(19) United States
(12) Patent Application Publication
(10) Pub. No.: US 2003/0180751 A1
(43) Pub. Date: Sep. 25, 2003

(54) Compositions isolated from forage grasses and methods for their use

(75) Inventors: Jeroen Demmer, Auckland (NZ); Richard L. Forster, Auckland (NZ); John Bryan Gibson, Canberra (AU); Michael Andrew Shenk, Auckland (NZ); Michael Geoffrey Norriss, Christchurch (NZ); Matthew Glenn, Auckland (NZ); Keith Martin Saulsbury, Christchurch (NZ); Claire Hall, Auckland (NZ)

Correspondence Address: SPECKMAN LAW GROUP, 1501 WESTERN AVE, SUITE 100, SEATTLE, WA, 98101, US

(73) Assignee: GENESIS RESEARCH AND DEVELOPMENT CORP. LTD., Parnell (NZ)

(21) Appl. No.: 10/289,757

(22) Filed: Nov. 7, 2002

Related U.S. Application Data
(60) Provisional application No. 60/337,703, filed on Nov. 7, 2001.

(51) Int. Cl. C12Q 1/68; C07H 21/04; C12N 9/00; C12N 15/82; A01H 5/00; C12N 5/04

(52) U.S. Cl. 435/6; 536/23.2; 536/24.3; 800/278; 800/320; 435/320.1; 435/419; 435/183

(57) ABSTRACT

Isolated polynucleotides encoding polypeptides active in lignin, fructan and tannin biosynthetic pathways are provided, together with expression vectors and host cells comprising such isolated polynucleotides. Methods for the use of such polynucleotides and polypeptides are also provided.

### REFERENCE TO RELATED APPLICATIONS

[0001] This application claims priority to U.S. Provisional Patent Application No. 60/337,703 filed Nov. 7, 2001.

### TECHNICAL FIELD OF THE INVENTION

[0002] This invention relates to polynucleotides isolated from forage grass tissues, specifically from Lolium perenne (perennial ryegrass) and Festuca arundinacea (tall fescue), as well as oligonucleotide probes and primers, genetic constructs comprising the polynucleotides, biological materials (including host cells and plants) incorporating the polynucleotides, polypeptides encoded by the polynucleotides, and methods for using the polynucleotides and polypeptides. More particularly, the invention relates to polypeptides involved in the lignin, tannin and fructan biosynthetic pathways, and to polynucleotides encoding such polypeptides.

### BACKGROUND OF THE INVENTION

[0003] Over the past 50 years, there have been substantial improvements in the genetic production potential of ruminant animals (sheep, cattle and deer). Levels of meat, milk or fiber production that equal an animal's genetic potential may be attained within controlled feeding systems, where animals are fully fed with energy dense, conserved forages and grains. However, the majority of temperate farming systems worldwide rely on the in situ grazing of pastures. Nutritional constraints associated with temperate pastures can prevent the full expression of an animal's genetic potential. This is illustrated by a comparison between milk production by North American grain-fed dairy cows and New Zealand pasture-fed cattle. North American dairy cattle produce, on average, twice the milk volume of New Zealand cattle, yet the genetic base is similar within both systems (New Zealand Dairy Board and United States Department of Agriculture figures). Significant potential therefore exists to improve the efficiency of conversion of pasture nutrients to animal products through the correction of nutritional constraints associated with pastures.

[0004] Lignin Biosynthetic Pathway

[0005] Lignin is an insoluble polymer that serves as a matrix around the polysaccharide components of some plant cell walls, and that is primarily responsible for the rigidity of plant stems. Generally, the higher the lignin content, the more rigid the plant. For example, tree species synthesize large quantities of lignin, with lignin constituting 20%-30% of the dry weight of wood. The lignin content of grasses ranges from 2-8% of dry weight and changes during the growing season. In addition to providing rigidity, lignin aids in water transport within plants by rendering cell walls hydrophobic and water impermeable. Lignin also plays a role in disease resistance of plants by impeding the penetration and propagation of pathogenic agents.

[0006] Forage digestibility is affected by both lignin composition and concentration. Lignin is largely responsible for the digestibility, or lack thereof, of forage crops, with small increases in plant lignin content resulting in relatively high decreases (>10%) in digestibility (Buxton and Russell, Crop. Sci. 28:5358-558, 1988). For example, crops with reduced lignin content provide more efficient forage for cattle, with the yield of milk and meat being higher relative to the amount of forage crop consumed. During normal plant growth, an increase in the maturity of the plant stem is accompanied by a corresponding increase in lignin content and composition that causes a decrease in digestibility. This change in lignin composition is to one of increasing syringyl:guaiacyl (S:G) ratio. When deciding on the optimum time to harvest forage crops, farmers must therefore choose between a high yield of less digestible material and a lower yield of more digestible material.

[0007] Lignin is formed by polymerization of three different monolignols, para-coumaryl alcohol, coniferyl alcohol and sinapyl alcohol that are synthesized in a multistep pathway, with each step in the pathway being catalyzed by a different enzyme. The three monolignols are derived from phenylalanine or tyrosine in a multistep process and are then polymerized into lignin by a free radical mechanism. Following polymerization, para-coumaryl alcohol, coniferyl alcohol and sinapyl alcohol are converted into the p-hydroxyphenyl (H), guaiacyl (G) and syringyl (S) units of lignin, respectively. While these three types of lignin subunits are well known, it is likely that slightly different variants of these subunits may be involved in the lignin biosynthetic pathway in various plants. For example, studies suggest that both free monolignols and monolignol-4-coumarate esters may be substrates for lignin formation in grasses. The relative concentration of the monolignol residues in lignin varies among different plant species and within species. For example, the monolignol content for H/G/S of grasses, alfalfa and softwood gymnosperms is 22%/44%/34%, 7%/39%/54% and 14%/80%/6%, respectively (van Soest in “Nutritional Ecology of the Ruminant,” Cornell University Press, Ithaca, N.Y.). The composition of lignin may also vary among different tissues within a specific plant.

[0008] Coniferyl alcohol, para-coumaryl alcohol and sinapyl alcohol are synthesized by similar pathways (Whetten et al., Annu. Rev. Plant Physiol. Plant Mol. Biol. 49:585-609, 1998; Guo et al., Plant Cell 13:73-88, 2001). The first step in the lignin biosynthetic pathway is the deamination of phenylalanine or tyrosine by phenylalanine ammonia-lyase (PAL) or tyrosine ammonia-lyase (TAL), respectively. In maize, the PAL enzyme also has TAL activity (Rosler et al., Plant Physiol. 113:175-179, 1997). The product of TAL activity on tyrosine is 4-coumarate, whereas the product of PAL activity on phenylalanine is cinnamate which is then hydroxylated by cinnamate 4-hydroxylase (C4H) to form 4-coumarate. 4-Coumarate is hydroxylated by coumarate 3-hydroxylase (C3H) to give caffeate. The newly added hydroxyl group is then methylated by caffeic acid O-methyl transferase (COMT) to give ferulate. Several other methylation reactions can be catalyzed by COMT, including caffeoylaldehyde to coniferaldehyde, and 5-hydroxyconiferaldehyde to sinapaldehyde. 4-Coumarate, caffeate and ferulate can all be conjugated to coenzyme A by 4-coumarate: CoA ligase (4CL) to form 4-coumaryl CoA, caffeoyl CoA and feruloyl CoA, respectively. Caffeoyl CoA can then be methylated by the enzyme caffeoyl-CoA O-methyl transferase (CAMT).

[0009] Coniferaldehyde is hydroxylated to 5-hydroxyconiferaldehyde by ferulate 5-hydroxylase (F5H). Reduction of 4-coumaryl CoA, caffeoyl CoA and feruloyl-CoA to 4-coumaraldehyde, caffeoyl aldehyde and coniferaldehyde, respectively, is catalyzed by cinnamoyl-CoA reductase (CCR). Coumaraldehyde, caffeoyl aldehyde, coniferaldehyde and 5-hydroxyconfieraldehyde are further reduced by the action of cinnamyl alcohol dehydrogenase (CAD) to give coniferyl alcohol which is then converted into its glucosylated form for export from the cytoplasm to the cell wall by coniferol glucosyl transferase (CGT). Recently a sinapyl alcohol dehydrogenase (SAD) was described that converts sinapaldehyde to sinapyl alcohol (Li et al., Plant Cell 13:1567-1586, 2001). Following export, the de-glucosylated form of coniferyl alcohol is obtained by the action of coniferin beta-glucosidase (CBG). Finally, polymerization of the three monolignols to provide lignin is catalyzed by phenolase (PNL), laccase (LAC) and peroxidase (PER). For a more detailed review of the lignin biosynthetic pathway, see Whetton R and Sederoff R, The Plant Cell, 7:1001-1013, 1995 and Whetten et al., Annu. Rev. Plant Physiol. Plant Mol. Biol. 49:585-609, 1998.

[0010] Both lignin levels and composition have been changed in a range of plant species by altering the expression of specific lignin biosynthetic enzymes. For example, anti-sense 4CL constructs in transgenic aspen trees reduced lignin content from 20 to 11% (a 45% reduction) but at the same time increased both cellulose levels (by 15%) and growth rate (Hu et al. Nature Biotechnol. 17:808-812, 1999). These trees had the same level of total carbon, suggesting that carbon partitioning had been altered. Reducing 4CL by either anti-sense or sense-suppression in tobacco plants led to an accumulation of hydroxycinnamic acids in cell walls as well as a reduction in both guaiacyl and syringyl lignin units (Kajita et al., Plant Cell. Physiol. 37:957-965, 1996). In transgenic tobacco plants in which levels of C4H were reduced by anti-sense or sense suppression, total lignin content was reduced, in addition to a reduction in syringyl lignin units (Sewalt et al., Plant Physiol. 115:41-50, 1997). Reducing the levels of PAL in tobacco plants by anti-sense or sense-suppression reduced total lignin content but did not change the syringyl-guaiacyl (S:G) lignin ration. In alfalfa, reducing expression of COMT through either anti-sense or gene silencing decreased total lignin by decreasing the amount of guaiacyl units and resulted in a near total loss of syringyl lignin units (Guo et al., Plant Cell 13:73-88, 2001). In contrast, reducing CCOMT expression through anti-sense or gene silencing in alfalfa plants also decreased total lignin by reducing the total amount of guaiacyl lignin units but had no effect on the amount of syringyl lignin. Reducing CCR expression by anti-sense in tobacco plants resulted in reduced lignin content and increased S:G ratios due to lower guaiacyl lignin units (Piquemal et al., Plant J. 13:71-83, 1998). A. thaliana plants where the F5H gene had been mutated contained only traces of syringyl lignin (Marita et al., Proc. Natl. Acad. Sci. USA 96:12323-12332, 1999).

[0011] Alteration of grass lignin composition may usefully be employed to maintain high forage digestibility throughout the year. This is most important when the plant is approaching flowering and/or during flowering. At this time, the entire lignin biosynthetic pathway will preferably be reduced, in particular lowering the amount of syringyl lignin units, thereby lowering the S:G ratio and maintaining the digestibility of the forage crop.

[0012] Several of the enzymes involved in the lignin biosynthetic pathway also have other functions within the plant. For example, PAL is a key enzyme of plant and fungi phenylpropanoid metabolism and catalyzes the first step in phenylpropanoid metabolism. It is involved in the biosynthesis of a wide variety of secondary metabolites such as flavonoids, furanocoumar in phytoalexins and cell wall components. These compounds have many important roles in plants during normal growth and in responses to environmental stress. PAL catalyzes the removal of an ammonia group from phenylalanine to form trans-cinnamate. PAL and the related histidine ammonia lyase are unique enzymes which are known to have the modified amino acid dehydroalanine (DHA) in their active site (Taylor et al., J. Biol. Chem. 265:18192-18199, 1990). Phenylalanine and histidine ammonia-lyases (PAL) active site has a consensus of GTITASGDLVPLSYIA. The serine residue is central to the active site, and the region around this active site residue is well conserved (Langer et al., Biochem. 33:6462-6467, 1994).

[0013] C4H, which is a member of the cytochrome P450 monooxygenase superfamily, plays a central role in both phenylpropanoid metabolism and lignin biosynthesis where it anchors a phenylpropanoid enzyme complex to the endoplasmic reticulum (ER). The phenylpropanoid pathway controls the synthesis of lignin, flower pigments, signaling molecules, and a large spectrum of compounds involved in plant defense against pathogens and UV light. This is also a branch point between general phenylpropanoid metabolism and pathways leading to various specific end products. 4 CLs are a group of enzymes necessary for maintaining a continuous metabolic flux for the biosynthesis of plant phenylpropanoids, such as lignin and flavonoids that are essential to the survival of plants, because they serve important functions in plant growth and adaptation to environmental perturbations. Three isoforms of 4CL have been identified with distinct substrate preference and specificities. Expression studies in angiosperms revealed a differential behavior of the three genes in various plant organs and upon external stimuli such as wounding and UV irradiation or upon challenge with fungi. One isoform is likely to participate in the biosynthetic pathway leading to flavonoids whereas the other two are probably involved in lignin formation and in the production of additional phenolic compounds other than flavonoids (Ehlting et al., Plant J. 19:9-20, 1999).

[0014] F5H is involved in the phenylpropanoid biosynthesis pathway. It belongs to the CYP84 subfamily of the cytochrome P450 family and is known as cytochrome P450 84A1. F5H is one of the enzymes in the pathways leading to the synthesis of sinapic acid esters, but also has coniferaldehyde hydroxylase activity (Nair et al., Plant Physiol. 123:1623-1634, 2000). In the generalized pathway for phenylpropanoid metabolism, F5H catalyzes the formation of 5-hydoxyferulate (a precursor of sinapate) and sinapate in turn as the precursor for sinapine and for sinapoyl CoA in two bifurcated pathways (Chapple et al., Plant Cell 4:1413-1424, 1992). Sinapoyl CoA has been considered as the precursor for sinapyl alcohol, which is then polymerized into syringyl (S) lignin. In addition, CYP84 F5H product carries out the hydroxylation of coniferaldehyde (ConAld) to 5-OH ConAld (Nair et al., Plant Physiol. 123:1623-1634, 2000).

[0015] Peroxidases are heme-containing enzymes that use hydrogen peroxide as the electron acceptor to catalyze a number of oxidative reactions. They belong to a superfamily consisting of 3 major classes. Class III consists of the secretory plant peroxidases, which have multiple tissue-specific functions in removal of hydrogen peroxide from chloroplasts and cytosol, oxidation of toxic compounds, biosynthesis of the cell wall, defense responses towards wounding, indole-3-acetic acid (IAA) catabolism and ethylene biosynthesis.

[0016] Fructan Biosynthetic Pathway

[0017] Plant carbohydrates can be divided into two groups depending on their function within the plant. Structural carbohydrates, such as cellulose, are usually part of the extracellular matrix. Non-structural, storage carbohydrates act as either long- or short-term carbohydrate stores. Examples of non-structural carbohydrates include starch, sucrose and fructans.

[0018] Fructans are polymers that are stored in the vacuole and that consist of linear and branched chains of fructose units (for review, see Vijn and Smeekens Plant Physiol. 120:351-359, 1999). They play an important role in assimilate partitioning and possibly in stress tolerance in many plant families. Grasses use fructans instead of starch as a water-soluble carbohydrate store (Pollock et al., in “Regulation of primary metabolic pathways in plants”, N. J. Kruger et al., (eds), Kluwer Academic Publishers, The Netherlands, pp195-226, 1999). Increasing the amount of fructans and sucrose in forage crops leads to an increase in the level of water-soluble carbohydrates and thereby enhances the nutritional value of the plants. In addition, increasing the amount of fructans in forage plants decreases m ethane production in animals fed the plants, thereby leading to lower greenhouse gas emissions, and decreases urea production in animals as less protein is degraded in the rumen (Biggs and Hancock, Trends in Plant Sci. 6:8-9, 2001). Fructans have also been implicated in protecting plants against water deficits caused by drought or low temperatures. Introduction of enzymes involved in the fructan biosynthetic pathway into plants that do not naturally synthesize fructans may be employed to confer cold tolerance and drought tolerance (Pilon-Smits, Plant Physiol. 107:125-130, 1995).

[0019] The number of fructose units within a fructan chain is referred to as the degree of polymerization (DP). In grasses, fructans of DP 6-10 are common. Such fructans of low DP are naturally sweet and are therefore of interest for use as sweeteners in foodstuffs. Long fructan chains form emulsions with a fat-like texture and a neutral taste. The human digestive system is unable to degrade fructans, and fructans of high D P may therefore be used as low-calorie food ingredients. Over-expression of enzymes involved in the fructan biosynthetic pathway may be usefully employed to produce quantities of fructans that can be purified for human consumption.

[0020] Five major classes of structurally different fructans have been identified in plants, with each class showing a different linkage of the fructosyl residues. Fructans found in grasses are of the mixed levan class, consisting of both (2-1)- and (2-6)-linked beta-D-fructosyl units (Pollock et al., in “Regulation of primary metabolic pathways in plants”, N. J. Kruger et al., (eds), Kluwer Academic Publishers, The Netherlands, pp195-226, 1999). Fructans are synthesized by the action of fructosyltransferase enzymes on sucrose in the vacuole. These enzymes are closely related to invertases, enzymes that normally hydrolyze sucrose.

[0021] Grasses use two fructosyltransferase enzymes to synthesize fructans, namely sucrose:sucrose 1-fructosyltransferase (1-SST) and sucrose:fructan 6-fructosyltransferase (6-SFT) (Pollock et al., in “Regulation of primary metabolic pathways in plants”, N. J. Kruger et al., (eds), Kluwer Academic Publishers, The Netherlands, pp195-226, 1999). 1-SST is a key enzyme in plant fructan biosynthesis, while 6-SFT catalyzes the formation and extension of beta-2,6-linked fructans that is typically found in grasses. Specifically, 1-SST catalyzes the formation of 1-kestose plus glucose from sucrose, while 6-SFT catalyzes the formation of bifurcose plus glucose from sucrose plus 1-kestose and also the formation of 6-kestose plus glucose from sucrose. Both enzymes can modify 1-kestose, 6-kestose and bifurcose further by adding additional fructose molecules. Over-expression of both 1-SST and 6-SFT in the same plant may be employed to produce fructans for use in human foodstuffs (Sevenier et al., Nature Biotechnol 16:843-846; Hellwege et al., Proc. Nat. Acad. Sci. USA 97:8699-8704,2000).

[0022] The synthesis of sucrose from photosynthetic assimilates in plants, and therefore the availability of sucrose for use in fructan formation, is controlled, in part, by the enzymes sucrose phosphate synthase (SPS) and sucrose phosphate phosphatase (SPP). Sucrose plays an important role in plant growth and development, and is a major end product of photosynthesis. It also functions as a primary transport sugar and in some cases as a direct or indirect regulator of gene expression (for a review see Smeekens, Curr. Opin. Plant Biol. 1:230-234, 1998). SPS regulates the synthesis of sucrose by regulating carbon partitioning in the leaves of plants and therefore plays a major role as a limiting factor in the export of photoassimilates out of the leaf The activity of SPS is regulated by phosphorylation and moderated by concentration of metabolites and light (Huber et al., Plant Physiol. 95:291-297, 1991). Specifically, SPS catalyzes the transfer of glucose from UDP-glucose to fructose-6-phosphate, thereby forming sucrose-6-phosphate (Suc-6-P). Suc-6-P is then dephosphorylated by SPP to form sucrose (Lunn et al., Proc. Natl. Acad. Sci. USA 97:12914-12919, 2000). The enzymes SPS and SPP exist as a heterotetramer in the cytoplasm of mesophyll cells in leaves, with SPP functioning to regulate SPS activity. SPS is also important in ripening fruits, sprouting tubers and germinating seeds (Laporte et al., Planta 212:817-822, 2001).

[0023] Once in the vacuole, sucrose can be converted into fructan by fructosyltransferases as discussed above, or hydrolyzed into glucose and fructose by the hydrolase enzymes known as invertases (Sturm, Plant Physiol. 121:1-7, 1999). There are several different types of invertases, namely extracellular (cell wall), vacuolar (soluble acid) and cytoplasmic, with at least two isoforms of each type of invertase normally being found within a plant species. In addition to having different subcellular locations, the different types of invertases have different biochemical properties. For example, soluble and cell wall invertases operate at acidic pH, whereas cytoplasmic invertases work at a more neutral or alkaline pH. Invertases are believed to regulate the entry of sucrose into different utilization pathways (Grof and Campbell, Aust. J. Plant Physiol. 28:1-12, 2001). Reduced vacuolar or cytoplasmic invertase activity in sink tissues may increase the level of water-soluble carbohydrates in plants. Plants contain several isoforms of cell wall invertases (CWINV), which accumulate as insoluble proteins. CWINV plays an important role in phloem unloading and in stress response. It hydrolyzes terminal non-reducing beta-D-fructofuranoside residues in beta-D-fructo-furanosides.

[0024] Another enzyme that acts upon sucrose in plants is soluble sucrose synthase (SUS). Recent results indicate that SUS is localized in the cytosol, associated with the plasma membrane and the actin cytoskeleton. Phosphorylation of SUS is one of the factors controlling localization of the enzyme (Winter and Huber, Crit. Rev. Biochem. Mol. Biol. 35:253-89, 2000). It catalyzes the transfer of glucose from sucrose to UDP, yielding UDP-glucose and fructose. Increasing the amount of SUS in a plant increases the amount of cellulose synthesis, whereas decreasing SUS activity should increase fructan levels. Increased SUS concentration may also increase the yield of fruiting bodies. SUS activity is highest in carbon sink tissues in plants and low in photosynthetic source tissues, and studies have indicated that SUS is the main sucrose-cleaving activity in sink tissues. Grasses have two isoforms of SUS that are encoded by separate genes. These genes are differentially expressed in different tissues.

[0025] Tannin Biosynthetic Pathway

[0026] Condensed tannins are polymerized flavonoids. More specifically, tannins are composed of catechin 4-ol and catechin monomer units, and are stored in the vacuole. In many temperate forage crops, such as ryegrass and fescue, foliar tissues are tannin-negative. This leads to a high initial rate of fermentation when these crops are consumed by ruminant livestock, resulting in both protein degradation and production of ammonia by the livestock. These effects can be reduced by the presence of low to moderate levels of tannin. In certain other plant species, the presence of high levels of tannins reduces palatability and nutritive value. Introduction of genes encoding enzymes involved in the biosynthesis of condensed tannins into a plant may be employed to synthesize flavonoid compounds that are not normally made in the plant. These compounds may then be isolated and used for treating human or animal disorders or as food additives.

[0027] Much of the biosynthetic pathway for condensed tannins is shared with that for anthocyanins, which are pigments responsible for flower color. Therefore, modulation of the levels of enzymes involved in the tannin biosynthetic pathway may be employed to alter the color of foliage and the pigments produced in flowers.

[0028] Most tannins described to date contain pro-cyanidin units derived from dihydroquercetin and pro-delphinidin units derived from dihydromyricetin. However, some tannins contain pro-pelargonidin units derived from dihydrokaempferol. The initial step in the tannin biosynthetic pathway is the condensation of coumaryl CoA with malonyl CoA to give naringenin-chalcone, which is catalyzed by the enzyme chalcone synthase (CHS). The enzyme chalcone isomerase (CHI) catalyzes the isomerization of naringenin chalcone to naringenin (also known as flavanone), which is then hydroxylated by the action of the enzyme flavonone 3-beta-hydroxylase (F3βH) to give dihydrokaempferol. The enzyme flavonoid 3′-hydroxylase (F3′OH) catalyzes the conversion of dihydrokaempferol to dihydroquercetin, which in turn can be converted into dihydromyricetin by the action of flavonoid 3′5′-hydroxylase (F3′5′OH). The enzyme dihydroflavonol-4-reductase (DFR) catalyzes the last step before dihydrokaempferol, dihydroquercetin and dihydromyricetin are committed for either anthocyanin (flower pigment) or proanthocyanidin (condensed tannin) formation. DFR also converts dihydrokaempferol to afzelchin-4-ol, dihydroquercetin to catechin-4-ol, and dihydromyricetin to gallocatechin-4-ol, probably by the action of more than one isoform. For a review of the tannin biosynthetic pathway, see, Robbins M. P. and Morris P. in Metabolic Engineering of Plant Secondary Metabolism, Verpoorte and Alfermann (eds), Kluwer Academic Publishers, the Netherlands, 2000.

[0029] While polynucleotides encoding some of the enzymes involved in the lignin, fructan and tannin biosynthetic pathways have been isolated for certain species of plants, genes encoding many of the enzymes in a wide range of plant species have not yet been identified. Thus there remains a need in the art for materials useful in the modification of lignin, fructan and tannin content and composition in plants, and for methods for their use.

### SUMMARY OF THE INVENTION

[0030] The present invention provides enzymes involved in the lignin, fructan or tannin biosynthetic pathways that are encoded by polynucleotides isolated from forage grass tissues. The polynucleotides were isolated from Lolium perenne (perennial ryegrass) and Festuca arundinacea (tall fescue) tissues taken at different times of the year, specifically in winter and spring, and from different parts of the plants, including: leaf blades, leaf base, pseudostems, floral stems, roots, inflorescences and stems. The present invention also provides genetic constructs, expression vectors and host cells comprising the inventive polynucleotides, and methods for using the inventive polynucleotides and genetic constructs to modulate the biosynthesis of lignins, fructans and tannins.

[0031] In specific embodiments, the isolated polynucleotides of the present invention comprise a sequence selected from the group consisting of: (a) SEQ ID NO: 1-62 and 125-162; (b) complements of SEQ ID NO: 1-62 and 125-162; (c) reverse complements of SEQ ID NO: 1-62 and 125-162; (d) reverse sequences of SEQ ID NO: 1-62 and 125-162; (e) sequences having a 99% probability of being functionally or evolutionarily related to a sequence of (a)-(d), determined as described below; and (f) sequences having at least 75%, 80%, 90% or 98% identity to a sequence of (a)-(d), the percentage identity being determined as described below. Polynucleotides comprising at least a specified number of contiguous residues (“x-mers”) of any of SEQ ID NO: 1-62 and 125-162; and oligonucleotide probes and primers corresponding to SEQ ID NO: 1-62 and 125-162 are also provided. All of the above polynucleotides are referred to herein as “polynucleotides of the present invention.”

[0032] In further aspects, the present invention provides isolated polypeptides comprising an amino acid sequence of SEQ ID NO: 63-124 and 163-190, together with polypeptides comprising a sequence having at least 75%, 80%, 90% or 98% identity to a sequence of SEQ ID NO: 63-124 and 163-190, wherein the polypeptide possesses the same functional activity as the polypeptide comprising a sequence of SEQ ID NO: 63-124 and 163-190. The present invention also contemplates isolated polypeptides comprising at least a functional portion of a polypeptide comprising an amino acid sequence selected from the group consisting of: (a) SEQ ID NO: 63-124 and 163-190; and (b) sequences having at least 75%, 80%, 90% or 98% identity to a sequence of SEQ ID NO: 63-124 and 163-190.

[0033] In another aspect, the present invention provides genetic constructs comprising a polynucleotide of the present invention, either alone, in combination with one or more of the inventive sequences, or in combination with one or more known polynucleotides.

[0034] In certain embodiments, the present invention provides genetic constructs comprising, in the 5′-3′ direction: a gene promoter sequence; an open reading frame coding for at least a functional portion of a polypeptide of the present invention; and a gene termination sequence. An open reading frame may be orientated in either a sense or anti-sense direction. Genetic constructs comprising a non-coding region of a polynucleotide of the present invention or a polynucleotide sequence complementary to a non-coding region, together with a gene promoter sequence and a gene termination sequence, are also provided. Preferably, the gene promoter and termination sequences are functional in a host cell, such as a plant cell. Most preferably, the gene promoter and termination sequences are those of the original enzyme genes but others generally used in the art, such as the Cauliflower Mosaic Virus (CMV) promoter, with or without enhancers, such as the Kozak sequence or Omega enhancer, and Agrobacterium tumefaciens nopalin synthase terminator may be usefully employed in the present invention. Tissue-specific promoters may be employed in order to target expression to one or more desired tissues. The construct may further include a marker for the identification of transformed cells.

[0035] In a further aspect, transgenic cells, such as transgenic plant cells, comprising the constructs of the present invention are provided, together with tissues and plants comprising such transgenic cells, and fruits, seeds and other products, derivatives, or progeny of such plants.

[0036] In yet another aspect, methods for modulating the lignin, fructan or tannin content and composition of a target organism, such as a plant, are provided, such methods including stably incorporating into the genome of the target plant a genetic construct comprising a polynucleotide of the present invention. In a preferred embodiment, the target plant is a forage grass, preferably selected from the group consisting of Lolium and Festuca species, and most preferably from the group consisting of Lolium perenne and Festuca arundinacea. In a related aspect, a method for producing a plant having altered lignin, fructan or tannin composition is provided, the method comprising transforming a plant cell with a genetic construct comprising of the present invention to provide a transgenic cell, and cultivating the transgenic cell under conditions conducive to regeneration and mature plant growth.

[0037] In yet a further aspect, the present invention provides methods for modifying the activity of an enzyme in a target organism, such as a plant, comprising stably incorporating into the genome of the target organism a genetic construct of the present invention. In a preferred embodiment, the target plant is a forage grass, preferably selected from the group consisting of Lolium and Festuca species, and most preferably from the group consisting of Lolium perenne and Festuca arundinacea.

### BRIEF DESCRIPTION OF THE DRAWINGS

[0038] FIG. 1 shows the activity of recombinant LpSPP (SEQ ID NO: 8) and FaSPP (SEQ ID NO 7) on dephosphorylating Suc-6-P and Fru-6-P. The pET41a extract was the vector control.

[0039] FIG. 2 shows the peroxidase activity of FaPER3 (SEQ ID NO: 50) and LpPER5 (SEQ ID NO: 52) as determined by oxidation of ABTS. Horseradish peroxidase of known activity (Sigma, St Louis, Mich.) was used as a positive control and boiled samples as a negative control.

[0040] FIG. 3 shows PCR verification of transgenic N. benthamiana plants transformed with Lp6-SFT1 (SEQ ID NO: 3). Genomic DNA was isolated from kanamycin resistant T2 N. benthamiana plants and the Lp6-SFT1 fragment was amplified using specific PCR primers.

[0041] FIG. 4 shows PCR verification of transgenic N. benthamiana plants transformed with Lp1-SST (SEQ ID NO: 1). Genomic DNA was isolated from kanamycin resistant T2 N. benthamiana plants and the Lp1-SST fragment was amplified using specific PCR primers. Plant number 5 is a non-transgenic control.

[0042] FIG. 5 shows the fructan level in transgenic N. benthamiana lines transformed with Lp6-SFT1 (SEQ ID NO: 3) and Lp1-SST (SEQ ID NO: 1).

[0043] FIG. 6 shows the sucrose synthesizing activity of FaSPS-N (SEQ ID NO: 9) with and without SPP (SEQ ID NO: 8) in mammalian cell extracts. The non-transfected cells are controls.

[0044] FIG. 7 shows the sucrose cleaving activity of FaSUS1 (SEQ ID NO: 13) in mammalian cell extracts.

[0045] FIG. 8 shows the invertase activity for vacuolar invertase (LpSINV1, SEQ ID NO: 25) and two cell wall invertases (LpCWINV1 and FaCWINV4, SEQ ID NO: 17 and 19); absence of invertase activity from an empty vector (pPICZαA) control is also shown.

### DETAILED DESCRIPTION OF THE INVENTION

[0046] The polypeptides of the present invention, and the polynucleotides encoding the polypeptides, have activity in lignin, fructan and tannin biosynthetic pathways in plants. Using the methods and materials of the present invention, the lignin, fructan and/or tannin content of a plant may be modulated by modulating expression of polynucleotides of the present invention, or by modifying the polynucleotides or polypeptides encoded by polynucleotides. The isolated polynucleotides and polypeptides of the present invention may thus be usefully employed in the correction of nutritional imbalances associated with temperate pastures and to increase the yield of animal products from pastures.

[0047] The lignin, fructan and/or tannin content of a target organism, such as a plant, may be modified, for example, by incorporating additional copies of genes encoding enzymes involved in the lignin, fructan or tannin biosynthetic pathways into the genome of the target plant. Similarly, a modified lignin, fructan and/or tannin content can be obtained by transforming the target plant with anti-sense copies of such genes. In addition, the number of copies of genes encoding for different enzymes in the lignin, fructan and tannin biosynthetic pathways can be manipulated to modify the relative amount of each monomer unit synthesized, thereby leading to the formation of lignins, fructans or tannins having altered composition.

[0048] The present invention thus provides methods for modulating the polynucleotide and/or polypeptide content and composition of an organism, such methods involving stably incorporating into the genome of the organism a genetic construct comprising one or more polynucleotides of the present invention. In one embodiment, the target organism is a plant species, preferably a forage plant, more preferably a grass of the Lolium or Festuca species, and most preferably Lolium perenne or Festuca arundinacea. In related aspects, methods for producing a plant having an altered genotype or phenotype is provided, such methods comprising transforming a plant cell with a genetic construct of the present invention to provide a transgenic cell, and cultivating the transgenic cell under conditions conducive to regeneration and mature plant growth. Plants having an altered genotype or phenotype as a consequence of modulation of the level or content of a polynucleotide or polypeptide of the present invention compared to a wild-type organism, as well as components (seeds, etc.) of such plants, and the progeny of such plants, are contemplated by and encompassed within the present invention.

[0049] The isolated polynucleotides of the present invention have utility in genome mapping, in physical mapping, and in positional cloning of genes. Additionally, the polynucleotide sequences identified as SEQ ID NOS: 1-62 and 125-162 and their variants, may be used to design oligonucleotide probes and primers. Oligonucleotide probes and primers have sequences that are substantially complementary to the polynucleotide of interest over a certain portion of the polynucleotide. Oligonucleotide probes designed using the polynucleotides of the present invention may be employed to detect the presence and examine the expression patterns of genes in any organism having sufficiently similar DNA and RNA sequences in their cells using techniques that are well known in the art, such as slot blot DNA hybridization techniques. Oligonucleotide primers designed using the polynucleotides of the present invention may be used for PCR amplifications. Oligonucleotide probes and primers designed using the polynucleotides of the present invention may also be used in connection with various microarray technologies, including the microarray technology of Affymetrix (Santa Clara, Calif.).

[0050] In a first aspect, the present invention provides isolated polynucleotide sequences identified in the attached Sequence Listing as SEQ ID NO: 1-62 and 125-162, and polypeptide sequences identified in the attached Sequence Listing as SEQ ID NO: 63-124 and 163-190. The polynucleotides and polypeptides of the present invention have demonstrated similarity to the following polypeptides that are known to be involved in lignin, fructan and tannin biosynthetic processes:

TABLE 1

| SEQ ID NO | SEQ ID NO | | |
|---|---|---|---|
| Polynucleotide | Polypeptide | Category | Description |
| 1 and 125 | 63 and 163 | Fructan | Homolog of Sucrose: Sucrose |
| | | biosynthesis | 1-fructosyl-transferase (1-SST) |
| | | | isolated from Festuca arundinacea. |
| | | | They contain a typical signature |
| | | | of the glycosyl hydrolases family 32 |
| | | | (amino acid residues 120 to 133). The |
| | | | glycosyl hydrolases family 32 domain |
| | | | signature has a consensus of |
| | | | HYQPxxH/NxxNDPNG, where D is the |
| | | | active site residue (Henrissat, Biochem. |
| | | | J. 280:309-316, 1991). |
| 2 | 64 | Fructan | Homolog of Sucrose: Sucrose 1-fructosyl- |
| | | biosynthesis | transferase (1-SST) isolated from |
| | | | Festuca arundinacea. It contains a |
| | | | typical signature of the glycosy |
| | | | hydrolases family 32 (amino acid |
| | | | residues 120 to 133). The glycosyl |
| | | | hydrolases family 32 domain signature |
| | | | has a consensus of HYQPxxH/NxxNDPNG, |
| | | | where D is the active site residue |
| | | | (Henrissat, Biochem. J. 280:309-316, |
| | | | 1991). |
| 3 and 126 | 65 and 164 | Fructan | Homolog of Sucrose: fructan 6-fructosyl- |
| | | biosynthesis | transferase (6-SFT) isolated from |
| | | | Festuca arundinacea. They contain |
| | | | a typical signature of the glycosyl |
| | | | hydrolases family 32 (amino acid reidues |
| | | | 90 to 564). The glycosyl hydrolases |
| | | | family 32 domain signature has a |
| | | | consensus of HYQPxxH/NxxNDPNG, where |
| | | | D is the active site residue (Henrissat, |
| | | | Biochem. J 280:309-316, 1991). |
| 4 and 127 | 66 and 165 | Fructan | Homolog of Sucrose: fructan 6-fructosyl- |
| | | biosynthesis | transferase (6-SFT) isolated from |
| | | | Lolium perenne. They contain a |
| | | | typical signature of the glycosyl |
| | | | hydrolases family 32 (amino acid |
| | | | residues 96 to 107). The glycosyl |
| | | | hydrolases family 32 domain signature |
| | | | has a consensus of HYQPxxH/NxxNDPNG, |
| | | | where D is the active site residue |
| | | | (Henrissat, Biochem. J. 280:309-316, |
| | | | 1991). |
| 5 | 67 | Fructan | Homolog of sucrose: fructan 6-fructosyl- |
| | | biosynthesis | transferase (6-SFT) isolated from |
| | | | Festuca arundinacea. |
| 6 and 128 | 68 and 166 | Fructan | Homolog of Sucrose: fructan 6-fructosyl- |
| | | biosynthesis | transferase (6-SFT) isolated from |
| | | | Lolium perenne. They contain a |
| | | | typical signature of the glycosyl |
| | | | hydrolases family 32 (amino acid |
| | | | residues 90 to 103). The glycosyl |
| | | | hydrolases family 32 domain signature |
| | | | has a consensus of HYQPxxH/NxxNDPNG, |
| | | | where D is the active site residue |
| | | | (Henrissat, Biochem. J. 280:309-316, |
| | | | 1991). |
| 7 and 129 | 69 | Fructan | Homolog of Sucrose-6-phosphate phospho- |
| | | biosynthesis | hydrolase (SPP; EC 3.1.3.24) isolated |
| | | | from Festuca arundinacea. This |
| | | | enzyme belongs to the superfamily of |
| | | | hydrolases, and has the three |
| | | | conserved motifs found in these proteins |
| | | | (Galperin and Koonin, Trends Biochem |
| | | | Sci. 23:127-129, 1998). Motif I |
| | | | (amino acid residues 10 to 19) contains |
| | | | conserved Asp and a Thr residues, motif |
| | | | II (amino acid residues 48 to 53) |
| | | | contains a conserved Thr residue, and |
| | | | Motif III (residues 167 to 220) contains |
| | | | conserved Lys (position 167) and Asp |
| | | | residues (position 202 and 206). These |
| | | | conserved amino acid residues are |
| | | | required for activity of the enzyme. |
| 8 | 70 | Fructan | Homolog of Sucrose-6-phosphate phospho- |
| | | biosynthesis | hydrolase (SPP; EC 3.1.3.24) isolated |
| | | | from Lolium perenne. This enzyme |
| | | | belongs to the superfamily of |
| | | | hydrolases, and has the three conserved |
| | | | motifs found in these proteins (Galperin |
| | | | and Koonin, Trends Biochem Sci. |
| | | | 23:127-129, 1998). Motif I (residues |
| | | | 10 to 19) contains conserved Asp and Thr |
| | | | residues, motif II (amino acid residues |
| | | | 48 to 53) contains a conserved Thr |
| | | | residue, and Motif III (amino acid |
| | | | residues 167 to 220) contains conserved |
| | | | Lys (position 167) and Asp residues |
| | | | (position 202 and 206). These conserved |
| | | | amino acid residues are required for |
| | | | activity of the enzyme. |
| 9 and 130 | 71 | Fructan | Homolog of sucrose phosphate synthase |
| | | biosynthesis | (SPS-1) isolated from Festuca |
| | | | arundinacea. |
| 10 and 131 | 72 and 167 | Fructan | Homolog of sucrose phosphate synthase |
| | | biosynthesis | (SPS-1) isolated from Lolium perenne |
| | | | and that is involved in the sucrose |
| | | | synthesis pathway. |
| 11 and 132 | 73 and 168 | Fructan | Homolog of sucrose phosphate synthase |
| | | biosynthesis | (SPS-N) isolated from Lolium perenne |
| | | | and that is involved in the sucrose |
| | | | synthesis pathway. |
| 12 and 133 | 74 and 169 | Fructan | Homolog of sucrose synthase (SuS) |
| | | biosynthesis | isolated from Lolium perenne. These |
| | | | molecules contain a leucine zipper |
| | | | motif in amino acid position 191 to |
| | | | 213. Leucine zipper motifs are present |
| | | | in many gene regulatory proteins |
| | | | (Landschulz et al., Science |
| | | | 240:1759-1764, 1988). |
| 13 | 75 | Fructan | Homolog of sucrose synthase (SuS) |
| | | biosynthesis | isolated from Festuca arundinacea. |
| | | | This molecule contains a leucine zipper |
| | | | motif in amino acid position 191 to |
| | | | 213. Leucine zipper motifs are present |
| | | | in many gene regulatory proteins |
| | | | (Landschulz et al., Science |
| | | | 240:1759-1764, 1988). |
| 14 and 134 | 76 and 170 | Fructan | Homolog of sucrose synthase (SuS) |
| | | biosynthesis | isolated from Lolium perenne. |
| 15 | 77 | Fructan | Homolog of sucrose synthase (SuS) |
| | | biosynthesis | isolated from Festuca arundinacea. |
| 16 and 135 | 78 and 171 | Fructan | Homologue of cell wall invertase |
| | | biosynthesis | (CWINV) isolated from Festuca |
| | | | arundinacea that belongs to the |
| | | | family 32 of glycosyl hydrolases. |
| | | | These molecules contain a conserved |
| | | | peptide domain in amino acid residues |
| | | | 139 to 144 and 242-247, respectively. |
| | | | The consensus peptide domain of |
| | | | invertases is (WVYL)EC(PIL)D(LFI) with |
| | | | the conserved Cys residue part of the |
| | | | catalytic domain (Sturm, Plant Physiol. |
| | | | 121:1-7, 1999). |
| 17 | 79 | Fructan | Homolog of cell wall invertase (CWINV) |
| | | biosynthesis | isolated from Lolium perenne that |
| | | | belongs to the family 32 of glycosyl |
| | | | hydrolases. This molecule contains a |
| | | | conserved pentapeptide bF-motif at amino |
| | | | acid residues 70 to 74 and a peptide |
| | | | domain in amino acid residues 250 to 255. |
| | | | The consensus peptide domain of |
| | | | invertases is (WVYL)EC(PIL)D(LFI) with |
| | | | the conserved Cys residue part of the |
| | | | catalytic domain (Sturm, Plant Physiol. |
| | | | 121:1-7, 1999). It also contains a |
| | | | glycosyl hydrolases family 32 signature |
| | | | region at amino acids 61 to 74 that |
| | | | contains a conserved His residue |
| | | | important in the catalytic reaction |
| | | | (Reddy and Maley, J. Biol. Chem. |
| | | | 265:10817-10120, 1990). |
| 18 and 136 | 80 and 172 | Fructan | Homolog of cell wall invertase (CWINV) |
| | | biosynthesis | isolated from Lolium perenne that |
| | | | belongs to the family 32 of glycosyl |
| | | | hydrolases. |
| 19 | 81 | Fructan | Homolog of cell wall invertase (CWINV) |
| | | biosynthesis | isolated from Festuca arundinacea |
| | | | that belongs to the family 32 of |
| | | | glycosyl hydrolases. This molecule |
| | | | contains a conserved pentapeptide |
| | | | bF-motif at amino acid residues 60 to |
| | | | 64. The consensus peptide domain of |
| | | | invertases is (WVYL)EC(PIL)D(LFI) with |
| | | | the conserved Cys residue part of the |
| | | | catalytic domain (Sturm, Plant Physiol. |
| | | | 121:1-7, 1999). It also contains a |
| | | | glycosyl hydrolases family 32 signature |
| | | | region at amino acids 51 to 64 that |
| | | | contains a conserved His residue |
| | | | important in the catalytic reaction |
| | | | (Reddy and Maley, J. Biol. Chem. |
| | | | 265:10817-10120, 1990). A signal |
| | | | peptide is present in amino acid |
| | | | residues 1 to 24. |
| 20 and 137 | 82 and 173 | Fructan | Homolog of cell wall invertase (CWINV) |
| | | biosynthesis | isolated from Festuca arundinacea |
| | | | that belongs to the family 32 of |
| | | | glycosyl hydrolases. These molecules |
| | | | contain a peptide domain in amino acid |
| | | | residues 61 to 66 and 242-247, |
| | | | respectively. The consensus peptide |
| | | | domain of invertases is |
| | | | (WVYL)EC(PIL)D(LFI) with the |
| | | | conserved Cys residue part of the |
| | | | catalytic domain (Sturm, Plant Physiol. |
| | | | 121:1-7, 1999). |
| 21 | 83 | Fructan | Homolog of cell wall invertase (CWTNV) |
| | | biosynthesis | isolated from Festuca arundinacea |
| | | | that belongs to the family 32 of |
| | | | glycosyl hydrolases. This molecule |
| | | | contains a conserved pentapeptide |
| | | | bF-motif at amino acid residues 73 to |
| | | | 77 and a peptide domain in amino acid |
| | | | residues 253 to 258. The consensus |
| | | | peptide domain of invertases is |
| | | | (WVYL)EC(PIL)D-(LFI) with the |
| | | | conserved Cys residue part of the |
| | | | catalytic domain (Sturm, Plant Physiol. |
| | | | 121:1-7, 1999). It also contains a |
| | | | glycosyl hydrolases family 32 |
| | | | signature region at amino acid 64 to |
| | | | 77 that contains a conserved His |
| | | | residue important in the catalytic |
| | | | reaction (Reddy and Maley, J. Biol. |
| | | | Chem. 265:10817-10120, 1990). |
| 22 and 138 | 84 and 174 | Fructan | Homolog of cell wall invertase (CWINV) |
| | | biosynthesis | isolated from Lolium perenne that |
| | | | belongs to the family 32 of glycosyl |
| | | | hydrolases. These molecules contain a |
| | | | peptide domain in amino acid residues |
| | | | 174 to 179 and 234 to 239, |
| | | | respectively. The consensus peptide |
| | | | domain of invertases is |
| | | | (WVYL)EC-(PIL)D(LFI) with |
| | | | the conserved Cys residue part of the |
| | | | catalytic domain (Sturm, Plant Physiol. |
| | | | 121:1-7, 1999). |
| 23 | 85 | Fructan | Homolog of cell wall invertase (CWINV) |
| | | biosynthesis | isolated from Festuca arundinacea |
| | | | that belongs to the family 32 of |
| | | | glycosyl hydrolases. This molecule |
| | | | contains a conserved pentapeptide |
| | | | bF-motif at amino acid residues 56 to |
| | | | 60. The consensus peptide domain of |
| | | | invertases is (WVYL)EC(PIL)D(LFI) |
| | | | with the conserved Cys residue part of |
| | | | the catalytic domain (Sturm, Plant |
| | | | Physiol. 121:1-7, 1999). It also |
| | | | contains a glycosyl hydrolases family |
| | | | 32 signature region at amino acid 47 |
| | | | to 60 that contains a conserved His |
| | | | residue that is important in the |
| | | | catalytic reaction (Reddy and Maley, |
| | | | J. Biol. Chem. 265:10817-10120, |
| | | | 1990). A signal peptide is present |
| | | | in amino acid residues 1 to 22. |
| 24 and 139 | 86 and 175 | Fructan | Homolog of cell wall invertase (CWINV) |
| | | biosynthesis | isolated from Lolium perenne |
| | | | that belongs to the family 32 of |
| | | | glycosyl hydrolases. These molecules |
| | | | contain a conserved pentapeptide |
| | | | bF-motif at amino acid residues 244 |
| | | | to 249. The consensus peptide domain |
| | | | of invertases is (WVYL)EC(PIL)D(LFI) |
| | | | with the conserved Cys residue part of |
| | | | the catalytic domain (Sturm, Plant |
| | | | Physiol. 121:1-7, 1999). They |
| | | | also contain a glycosyl hydrolases |
| | | | family 32 signature region at amino |
| | | | acid 56 to 69 that contains a |
| | | | conserved His residue that is |
| | | | important in the catalytic reaction |
| | | | (Reddy and Maley, J. Biol. Chem. |
| | | | 265:10817-10120, 1990). A signal |
| | | | peptide is present in amino acid |
| | | | residues 1 to 25. |
| 25 and 140 | 87 and 176 | Fructan | Homolog of vacuolar invertase (SINV) |
| | | biosynthesis | isolated from Lolium perenne |
| | | | that belongs to the family 32 of |
| | | | glycosyl hydrolases. These molecules |
| | | | contain a conserved pentapeptide |
| | | | bF-motif at amino acid residues 136 |
| | | | to 140 and 138 to 142, respectively |
| | | | and a peptide domain in amino |
| | | | acid residues 317 to 322 and 319 to |
| | | | 324, respectively. The consensus |
| | | | peptide domain of invertases is |
| | | | (WVYL)EC(PIL)D(LFI) with the |
| | | | conserved Cys residue part of the |
| | | | catalytic domain (Sturm, Plant |
| | | | Physiol. 121:1-7, 1999). It also |
| | | | contains a glycosyl hydrolases |
| | | | family 32 signature region at amino |
| | | | acid 127 to 140 and 129 to 142 that |
| | | | contains a conserved His residue |
| | | | that is important in the catalytic |
| | | | reaction (Reddy and Maley, J. Biol. |
| | | | Chem. 265:10817-10120, 1990). |
| 26 and 141 | 88 and 177 | Fructan | Homolog of invertase (SINV) |
| | | biosynthesis | isolated from Lolium perenne |
| | | | that belongs to the family 32 of |
| | | | glycosyl hydrolases. These molecules |
| | | | contain a peptide domain in amino |
| | | | acid residues 143 to 148 and 184 |
| | | | to 189, respectively. The consensus |
| | | | peptide domain of invertases is |
| | | | (WVYL)EC(PIL)D(LFI) with the |
| | | | conserved Cys residue part of the |
| | | | catalytic domain (Sturm, Plant |
| | | | Physiol. 121:1-7, 1999). |
| 27 | 89 | Lignin/Tannin | Homolog of 4-Coumarate: CoA ligase |
| | | biosynthesis | (4CL, EC 6.2.1.12) isolated from |
| | | | Lolium perenne The molecule |
| | | | has two conserved AMP binding |
| | | | regions at amino acid residues 182 |
| | | | to 193 and 383 to 389 (Hu et al., |
| | | | Proc. Natl. Acad. Sci. USA |
| | | | 95:5407-5412, 1998). The |
| | | | AMP-binding domain signature |
| | | | consists of two binding site |
| | | | motifs. The consensus of the first |
| | | | motif is LPYSSGTTGLPK (Etchegaray |
| | | | et al., Biochem. Mol. Biol. Int. |
| | | | 44:235-243, 1998). The region |
| | | | very rich in glycine, serine, and |
| | | | threonine followed by a conserved |
| | | | lysine. In most of these proteins, |
| | | | the residue that follows the Lys |
| | | | at the end of the pattern is a Gly. |
| | | | The second motif consensus sequence |
| | | | is GEIC(V/I)RG(Hu et al., Proc. |
| | | | Natl. Acad. Sci. USA 95:5407-5412, |
| | | | 1998). |
| 28 and 142 | 90 | Lignin/Tannin | Homolog of 4-Coumarate: CoA ligase |
| | | biosynthesis | (4CL, EC 6.2.1.12) isolated from |
| | | | Lolium perenne. The molecule |
| | | | has two conserved AMP binding |
| | | | regions at amino acid residues 195 |
| | | | to 206 and 395 to 401 (Hu et al., |
| | | | Proc. Natl. Acad. Sci. USA |
| | | | 95:5407-5412, 1998). The |
| | | | AMP-binding domain signature |
| | | | consists of two binding site motifs. |
| | | | The consensus of the first motif |
| | | | is LPYSSGTTGLPK (Etchegaray et al., |
| | | | Biochem. Mol. Biol. Int. |
| | | | 44:235-243, 1998). The region very |
| | | | rich in glycine, serine, and theonine |
| | | | followed by a conserved lysine. In |
| | | | most of these proteins, the residue |
| | | | that follows the Lys at the end of |
| | | | the pattern is a Gly. The second |
| | | | motif consensus sequence is GEIC(V/I) |
| | | | RG (Hu et al., Proc. Natl. Acad. Sci. |
| | | | USA 95:5407-5412, 1998). |
| 29 | 91 | Lignin/Tannin | Homolog of 4-Coumarate:CoA ligase |
| | | biosynthesis | (4CL, EC 6.2.1.12) isolated from |
| | | | Festuca arundinacea. The molecule |
| | | | has two conserved AMP binding regions |
| | | | at amino acid residues 195 to 206 and |
| | | | 395 to 401 (Hu et al., Proc. Natl. |
| | | | Acad. Sci. USA 95:5407-5412, 1998). |
| | | | The AMP-binding domain signature |
| | | | consists of two binding site motifs. |
| | | | The consensus of the first motif is |
| | | | LPYSSGTTGLPK (Etchegaray et al., |
| | | | Biochem. Mol. Biol. Int. 44:235-243, |
| | | | 1998). The region very rich in glycine, |
| | | | serine, and threonine followed by a |
| | | | conserved lysine. In most of these |
| | | | proteins, the residue that follows |
| | | | the Lys at the end of the pattern is a |
| | | | Gly. The second motif consensus |
| | | | sequence is GEIC(V/I)RG (Hu et al., |
| | | | Proc. Natl. Acad. Sci. USA 95:5407-54 12, |
| | | | 1998). |
| 30 and 143 | 92 and 178 | Lignin/Tannin | Homolog of 4-Coumarate:CoA ligase |
| | | biosynthesis | (4CL, EC 6.2.1.12) isolated from |
| | | | Lolium. The molecules have two |
| | | | conserved AMP binding regions at amino |
| | | | acid residues 194 to 205 and 394 to |
| | | | 400 (Hu et al., Proc. Natl. Acad. Sci. |
| | | | USA 95:5407-5412, 1998). The AMP- |
| | | | binding domain signature consists of two |
| | | | binding site motifs. The consensus of the |
| | | | first motif is LPYSSGTTGLPK (Etchegaray |
| | | | et al., Biochem. Mol. Biol. Int. |
| | | | 44:235-243, 1998). The region very |
| | | | rich in glycine, serine, and threonine |
| | | | followed by a conserved lysine. In most |
| | | | of these proteins, the residue that |
| | | | follows the Lys at the end of the pattern |
| | | | is a Gly. The second motif consensus |
| | | | sequence is GEIC(V/I)RG (Hu et al., Proc. |
| | | | Natl. Acad. Sci. USA 95:5407-5412, |
| | | | 1998). |
| 31 | 93 | Lignin/Tannin | Homolog of 4-Coumarate:CoA ligase (4CL, |
| | | biosynthesis | EC 6.2.1.12) isolated from Festuca |
| | | | arundinacea. The molecule has two |
| | | | conserved AMP binding regions at amino |
| | | | acid residues 194 to 206 and 482 to 490 |
| | | | (Hu et al., Proc. Natl. Acad. Sci. USA |
| | | | 95:5407-5412, 1998). The AMP-binding |
| | | | domain signature consists of two binding |
| | | | site motifs. The consensus of the first |
| | | | motif is LPYSSGTTGLPK (Etchegaray et |
| | | | al., Biochem. Mol. Biol. Int. 44:235-243, |
| | | | 1998). The region very rich in glycine, |
| | | | serine, and threonine followed by a |
| | | | conserved lysine. In most of these proteins, |
| | | | the residue that follows the Lys at the end |
| | | | of the pattern is a Gly. The second motif |
| | | | consensus sequence is GEIC(V/I)RG (Hu et |
| | | | al., Proc. Natl. Acad. Sci. USA |
| | | | 95:5407-5412, 1998). |
| 32 and 144 | 94 and 179 | LigninlTannin | Homolog of cinnamic acid 4-hydroxylase |
| | | biosynthesis | (C4H) isolated from Lolium perenne. The |
| | | | molecules have a conserved cytochrome P450 |
| | | | region in amino acids 436 to 445 that |
| | | | contains a conserved Cys residue involved |
| | | | in heme binding (Miles et al., Biochim |
| | | | Biophys Acta 1543:383-407, 2000). |
| 33 | 95 | Lignin/Tannin | Homolog of cinnamic acid 4-hydroxylase |
| | | biosynthesis | (C4H) isolated from Festuca arundinacea. |
| | | | The molecule has a conserved Cytochrome |
| | | | P450 region in amino acids 440 to 449 that |
| | | | contains a conserved Cys residue involved |
| | | | in heme binding. The cytochrome P450 |
| | | | cysteine heme-iron ligand signature |
| | | | consensus is FG × GRRSCPG where the con- |
| | | | served C is the heme iron ligand (Miles et |
| | | | al., Biochim. Biophys. Acta 1543:383-407, |
| | | | 2000). It also contains an aldehyde de- |
| | | | hydrogenases active site (Hempel et al., |
| | | | Adv. Exp. Med. Biol. 436:53-59, 1999) at |
| | | | amino acid residues 428 to 435. A hy- |
| | | | drophobic signal peptide region is |
| | | | present in amino acid residues 1 to 24. |
| 34 and 145 | 96 and 180 | Lignin | Homolog of cinnamyl-alcohol dehydrogenase |
| | | biosynthesis | (CAD; EC 1.1.1.195) isolated from Lolium |
| | | | perenne. These molecules contain a conserved |
| | | | zinc-containing alcohol dehydrogenase |
| | | | domain (Joernvall et al., Eur. J. Biochem. |
| | | | 167:195-201, 1987) in amino acid |
| | | | residues 69 to 83, with a conserved His |
| | | | residue at position 70. They also contain |
| | | | a cytochrome C family heme-binding site |
| | | | signature (Mathews, Prog. Biophys. Mol. |
| | | | Biol. 45:1-56, 1985) in residues 45 to |
| | | | 50. |
| 35 | 97 | Lignin | Homolog of cinnamyl-alcohol dehydrogenase |
| | | biosynthesis | (CAD; EC 1.1.1.195) isolated from Festuca |
| | | | arundinacea. CAD belongs to the family |
| | | | of zinc-binding dehydrogenases. This |
| | | | molecule contains a conserved zinc- |
| | | | containing alcohol dehydrogenases domain |
| | | | (Joernvall et al., Eur. J. Biochem. |
| | | | 167:195-201, 1987) in amino acid |
| | | | residues 69 to 83, with a conserved His |
| | | | residue at position 70. It also contains |
| | | | a Cytochrome C family heme-binding site |
| | | | signature. The cytochrome C family heme- |
| | | | binding site signature is CGICHT. In the |
| | | | cytochrome C protein family, the heme |
| | | | group is covalently attached by thioether |
| | | | bonds to two conserved cysteine residues. |
| | | | The consensus sequence for this site is |
| | | | Cys-X-X-Cys-His and the histidine residue |
| | | | is one of the two axial ligands of the |
| | | | heme iron. This arrangement is shared by |
| | | | all proteins known to belong to cytochrome |
| | | | C family (Mathews, Prog. Biophys. Mol. |
| | | | Biol. 45:1-56, 1985). |
| 36 and 146 | 98 | Lignin | Homolog of caffeoyl coenzyme A O- |
| | | biosynthesis | methyltransferase (CCoAOMT) (EC 2.1.1.104) |
| | | | isolated from Lolium perenne. |
| 37 | 99 | Lignin | Homolog of caffeoyl coenzyme A O- |
| | | biosynthesis | methyltransferase (CCoAOMT) (EC 2.1.1.104) |
| | | | isolated from Festuca arundinacea. |
| 38 and 147 | 100 and 181 | Lignin | Homolog of cinnamoyl CoA:NADP |
| | | biosynthesis | oxidoreductase (CCR, EC 1.2.1.44) isolated |
| | | | from Lolium perenne that catalyzes the |
| | | | conversion of cinnamoyl CoA esters to their |
| | | | corresponding cinnamaldehydes in the first |
| | | | specific step in the synthesis of the |
| | | | lignin monomers. A hydrophobic region |
| | | | typical of a signal peptide is present in |
| | | | amino acid residues 1 to 24. |
| 39 and 148 | 101 | Lignin | Homolog of cinnamoyl CoA:NADP oxidoreductase |
| | | biosynthesis | (CCR, EC 1.2.1.44) isolated from Festuca |
| | | | arundinacea that catalyzes the |
| | | | conversion of cinnamoyl CoA esters to their |
| | | | corresponding cinnamaldehydes in the first |
| | | | specific step in the synthesis of the |
| | | | lignin monomers. |
| 40 and 149 | 102 and 182 | Lignin | Homolog of caffeic acid 3-O-methyltrans- |
| | | biosynthesis | ferase (COMT1) isolated from Festuca |
| | | | arundinacea A conserved consensus |
| | | | phosphopantetheine attachment site was |
| | | | identified in amino acid residues 47 to 62. |
| | | | This domain is involved in the attachment |
| | | | of activated fatty acid and amino-acid |
| | | | groups, with the Ser residue at position 52 |
| | | | crucial for the phosphopantetheine attach- |
| | | | ment (Pugh and Wakil, J. Biol. Chem. |
| | | | 240:4727-4733, 1965). |
| 41 and 150 | 103 | Lignin | Homolog of caffeic acid 3-O-methyltrans- |
| | | biosynthesis | ferase (COMT1) isolated from Lolium perenne |
| | | | A conserved consensus phosphopantetheine |
| | | | attachment site was identified in amino |
| | | | acid residues 47 to 62. This domain is |
| | | | involved in the attachment of activated fatty |
| | | | acid and amino-acid groups, with the Ser |
| | | | residue at position 52 crucial for the phos- |
| | | | phopantetheine attachment (Pugh and Wakil, |
| | | | J. Biol. Chem. 240:4727-4733, 1965). |
| 42 | 104 | Lignin | Homolog of caffeic acid 3-O-methyltransferase |
| | | biosynthesis | (COMT1) isolated from Festuca arundinacea |
| | | | A conserved consensus phosphopantetheine |
| | | | attachment site was identified in amino acid |
| | | | residues 47 to 62. This domain is involved |
| | | | in the attachment of activated fatty acid |
| | | | and amino-acid groups, with the Ser residue |
| | | | at position 52 crucial for the |
| | | | phosphopantetheine attachment (Pugh and |
| | | | Wakil, J. Biol. Chem. 240:4727-4733, 1965). |
| 43 | 105 | Lignin | Homolog of caffeic acid 3-O-methyltransferase |
| | | biosynthesis | (COMT1) isolated from Lolium perenne A |
| | | | conserved consensus phosphopantetheine |
| | | | attachment site was identified in amino acid |
| | | | residues 47 to 62. This domain is involved in |
| | | | the attachment of activated fatty acid and |
| | | | amino-acid groups, with the Ser residue at |
| | | | position 52 crucial for the phosphopantetheine |
| | | | attachment (Pugh and Wakil, J. Biol. Chem. |
| | | | 240:4727-4733, 1965). |
| 44 and 151 | 106 and 183 | Lignin | Homolog of ferulate 5-hydroxylase (F5H) |
| | | biosynthesis | isolated from Lolium perenne. The |
| | | | molecules have a conserved cytochrome P450 |
| | | | region in amino acids 463 to 472 that contains |
| | | | a conserved Cys residue involved in heme |
| | | | binding (Miles et al., Biochim Biophys Acta |
| | | | 1543:383-407, 2000). A signal peptide is |
| | | | present in amino acid residues 1 to 30. |
| 45 | 107 | Lignin | Homolog of ferulate 5-hydroxylase (F5H) |
| | | biosynthesis | isolated from Festuca arundinaceae. The |
| | | | molecule has a conserved cytochrome P450 |
| | | | region in amino acids 462 to 471 that contains |
| | | | a conserved Cys residue involved in heme |
| | | | binding (Miles et al., Biochim Biophys Acta |
| | | | 1543:383-407, 2000). A signal peptide is |
| | | | present in amino acid residues 1 to 30. |
| 46 and 152 | 108 | Lignin/Tannin | Homolog of phenylalanine ammonia-lyase (EC |
| | | biosynthesis | 4.3.1.5) (PAL) isolated from Lolium |
| | | | perenne. The polypeptide has a con- |
| | | | served PAL-histidase region in amino acid |
| | | | residues 193 to 209. |
| 47 and 153 | 109 and 184 | Lignin/Tannin | Homolog of phenylalanine ammonia-lyase (EC |
| | | biosynthesis | 4.3.1.5) (PAL) isolated from Festuca |
| | | | arundinacea. A conserved phenylalanine |
| | | | and histidine ammonia-lyases active site |
| | | | signature has been identified in amino acid |
| | | | residues 195 to 210 |
| 48 | 110 | Lignin | Homolog of peroxidase (PER) isolated from |
| | | biosynthesis | Festuca arundinacea. The conserved |
| | | | peroxidase I region is present in amino |
| | | | acid residues 188 to 199 and contains a |
| | | | conserved His residue at position 196 in the |
| | | | active site, and the conserved peroxidase |
| | | | 2 region is present in amino acid residues |
| | | | 60 to 71, with a conserved His residue at |
| | | | position 69 that is involved in heme |
| | | | binding (Kimura and Ikeda-Saito, Proteins |
| | | | 3:113-120, 1988). A signal peptide is |
| | | | present in amino acid residues 1 to 27. |
| 49 | 111 | Lignin | Homolog of peroxidase (PER) isolated from |
| | | biosynthesis | Lolium perenne. The conserved peroxidase |
| | | | I region is present in amino acid residues |
| | | | 199 to 209 and contains a conserved His |
| | | | residue at position 208 in the active site. |
| | | | A signal peptide is present in amino acid |
| | | | residues 1 to 33. |
| 50 | 112 | Lignin | Homolog of peroxidase (PER) isolated from |
| | | biosynthesis | Festuca arundinacea. The conserved |
| | | | peroxidase I region is present in amino acid |
| | | | residues 180 to 190 and contains a |
| | | | conserved His residue at position 188 in |
| | | | the active site, and the conserved |
| | | | peroxidase 2 region is present in amino acid |
| | | | residues 55 to 66, with a conserved His |
| | | | residue at position 64 that is involved in |
| | | | heme binding (Kimura and Ikeda-Saito, |
| | | | Proteins 3:113-120, 1988). A signal peptide |
| | | | is present in amino acid residues 1 to 22. |
| 51 and 154 | 113 | Lignin | Homolog of peroxidase (PER) isolated from |
| | | biosynthesis | Lolium perenne. The conserved peroxidase |
| | | | I region is present in amino acid residues |
| | | | 199 to 209 and contains a conserved His |
| | | | residue at position 207 in the active site, |
| | | | and the conserved peroxidase 2 region is |
| | | | present in amino acid residues 70 to 80, with |
| | | | a conserved His residue at position 78 that |
| | | | is involved in heme binding (Kimura and |
| | | | Ikeda-Saito, Proteins 3:113-120, 1988). A |
| | | | signal peptide is present in amino acid |
| | | | residues 1 to 20. |
| 52 and 155 | 114 | Lignin | Homolog of peroxidase (PER) isolated from |
| | | biosynthesis | Lolium perenne. The conserved peroxidase |
| | | | I region is present in amino acid residues |
| | | | 198 to 208 and contains a conserved His |
| | | | residue at position 206 in the active site |
| | | | (Kimura and Ikeda-Saito, Proteins 3:113-120, |
| | | | 1988). A signal peptide is present in amino |
| | | | acid residues 1 to 34. |
| 53, 156, and | 115, 185, and | Lignin | Homolog of peroxidase (PER) isolated from |
| 162 | 190 | biosynthesis | Lolium perenne. The conserved peroxidase I |
| | | | region is present in amino acid residues |
| | | | 157 to 168, 188 to 199, and 190 to 201, |
| | | | respectively and contain a conserved His |
| | | | residue at position 165, 196 and 198, |
| | | | respectively in the active site, and the |
| | | | conserved peroxidase 2 region is present in |
| | | | amino acid residues 29 to 41, 60 to 72 and 62 |
| | | | to 74, respectively, with a conserved His |
| | | | residue at position 38, 69 and 71, |
| | | | respectively that is involved in heme binding |
| | | | (Kimura and Ikeda-Saito, Proteins 3:113-120, |
| | | | 1988). |
| 54 | 116 | Lignin | Homolog of peroxidase (PER) isolated from |
| | | biosynthesis | Festuca arundinacea. The conserved |
| | | | peroxidase I region is present in amino acid |
| | | | residues 176 to 186 and contains a conserved |
| | | | His residue at position 184 in the active |
| | | | site, and the conserved peroxidase 2 region |
| | | | is present in amino acid residues 55 to 67, |
| | | | with a conserved His residue at position 64 |
| | | | that is involved in heme binding (Kimura and |
| | | | Ikeda-Saito, Proteins 3:113-120, 1988). A |
| | | | signal peptide is present in amino acid |
| | | | residues 1 to 22. |
| 55 | 117 | Tannin | Homolog of chalcone isomerase (CHI) isolated |
| | | Biosynthesis | from Lolium perenne. The molecule contains |
| | | | a chalcone isomerase region at amino acid |
| | | | residues 1 to 213. |
| 56 | 118 | Tannin | Homolog of chalcone isomerase (CHI). The |
| | | Biosynthesis | molecule contains a chalcone isomerase region |
| | | | at amino acid residues 23 to 235. |
| 57 and 157 | 119 and 186 | Tannin | Homolog of Chalcone Synthase (CHS) isolated |
| | | Biosynthesis | from Lolium perenne and that is an |
| | | | important enzyme in flavonoid synthesis. The |
| | | | molecules contain a conserved chalcone syn- |
| | | | thase active site (Lanz et al., J. Biol. |
| | | | Chem. 266:9971-9976, 1991) at amino acid |
| | | | residues 166 to 175, with the conserved Cys |
| | | | residue at position 167. |
| 58 and 158 | 120 and 187 | Tannin | Homolog of dihydroflavonal-4-reductase |
| | | Biosynthesis | (DFR) isolated from Festuca arundinacea. |
| 59 and 159 | 121 and 188 | Tannin | Homolog of dihydroflavonal-4-reductase |
| | | Biosynthesis | (DFR) isolated from Lolium perenne. |
| 60 and 160 | 122 and 189 | Tannin | Homolog of dihydroflavonal-4-reductase |
| | | Biosynthesis | (DFR) isolated from Lolium perenne. |
| | | | These molecules contain a conserved |
| | | | ATP/GTP binding site at amino acid residues |
| | | | 84 to 91 and 86 to 93, respectively, known |
| | | | as the “A” sequence (Walker et al., |
| | | | EMBO J. 1:945-951, 1982) or “P-loop” |
| | | | (Saraste et al., Trends Biochem. Sd. |
| | | | 15:430-434, 1990). |
| 61 and 161 | 123 | Tannin | Homolog of flavanone 3-βhydroxylase |
| | | biosynthesis | (F3βH) isolated from Lolium perenne. |
| 62 | 124 | Tannin | Homolog of flavanone 3-βhydroxylase |
| | | Biosynthesis | (F3βH) isolated from Festuca arundinacea. |

[0051] All the polynucleotides and polypeptides provided by the present invention are isolated and purified, as those terms are commonly used in the art. Preferably, the polypeptides and polynucleotides are at least about 80% pure, more preferably at least about 90% pure, and most preferably at least about 99% pure.

[0052] The word “polynucleotide(s),” as used herein, means a polymeric collection of nucleotides, and includes DNA and corresponding RNA molecules and both single and double stranded molecules, including RNAi, HnRNA and mRNA molecules, sense and anti-sense strands of DNA and RNA molecules, and comprehends cDNA, genomic DNA, and wholly or partially synthesized polynucleotides. A polynucleotide of the present invention may be an entire gene, or any portion thereof. As used herein, a “gene” is a DNA sequence which codes for a functional protein or RNA molecule. Operable anti-sense polynucleotides may comprise a fragment of the corresponding polynucleotide, and the definition of “polynucleotide” therefore includes all operable anti-sense fragments. Anti-sense polynucleotides and techniques involving anti-sense polynucleotides are well known in the art and are described, for example, in Robinson-Benion et al., Methods in Enzymol. 254(23): 363-375, 1995 and Kawasaki et al., Artific. Organs 20(8): 836-848, 1996.

[0053] In specific embodiments, the present invention provides isolated polynucleotides comprising a sequence of SEQ ID NO: 1-62 and 125-162; polynucleotides comprising variants of SEQ ID NO: 1-62 and 125-162; polynucleotides comprising extended sequences of SEQ ID NO: 1-62 and 125-162 and their variants, oligonucleotide primers and probes corresponding to the sequences set out in SEQ ID NO: 1-62 and 125-162 and their variants, polynucleotides comprising at least a specified number of contiguous residues of any of SEQ ID NO: 1-62 and 125-162 (x-mers), and polynucleotides comprising extended sequences which include portions of the sequences set out in SEQ ID NO: 1-62 and 125-162, all of which are referred to herein, collectively, as “polynucleotides of the present invention.” Polynucleotides that comprise complements of such polynucleotide sequences, reverse complements of such polynucleotide sequences, or reverse sequences of such polynucleotide sequences, together with variants of such sequences, are also provided.

[0054] The definition of the terms “complement(s),” “reverse complement(s),” and “reverse sequence(s),” as used herein, is best illustrated by the following example. For the sequence 5′ AGGACC 3′, the complement, reverse complement, and reverse sequence are as follows:

| | |
|---|---|
| complement | 3′ TCCTGG 5′ |
| reverse complement | 3′ GGTCCT 5′ |
| reverse sequence | 5′ CCAGGA 3′ |

[0055] Preferably, sequences that are complements of a specifically recited polynucleotide sequence are complementary over the entire length of the specific polynucleotide sequence.

[0056] As used herein, the term “x-mer,” with reference to a specific value of “x,” refers to a polynucleotide comprising at least a specified number (“x”) of contiguous residues of: any of the polynucleotides provided in SEQ ID NO: 1-62 and 125-162. The value of x may be from about 20 to about 600, depending upon the specific sequence.

[0057] Polynucleotides of the present invention comprehend polynucleotides comprising at least a specified number of contiguous residues (x-mers) of any of the polynucleotides identified as SEQ ID NO: 1-62 and 125-162, or their variants. Similarly, polypeptides of the present invention comprehend polypeptides comprising at least a specified number of contiguous residues (x-mers) of any of the polypeptides identified as SEQ ID NO: 63-124 and 163-190. According to preferred embodiments, the value of x is at least 20, more preferably at least 40, more preferably yet at least 60, and most preferably at least 80. Thus, polynucleotides of the present invention include polynucleotides comprising a 20-mer, a 40-mer, a 60-mer, an 80-mer, a 100-mer, a 120-mer, a 150-mer, a 180-mer, a 220-mer, a 250-mer; or a 300-mer, 400-mer, 500-mer or 600-mer of a polynucleotide provided in SEQ ID NO: 1-62 and 125-162, or a variant of one of the polynucleotides corresponding to the polynucleotides provided in SEQ ID NO: 1-62 and 125-162. Polypeptides of the present invention include polypeptides comprising a 20-mer, a 40-mer, a 60-mer, an 80-mer, a 100-mer, a 120-mer, a 150-mer, a 180-mer, a 220-mer, a 250-mer; or a 300-mer, 400-mer, 500-mer or 600-mer of a polypeptide provided in SEQ ID NO: 63-124 and 163-190, or a variant thereof.

[0058] Polynucleotides of the present invention were isolated by high throughput sequencing of cDNA libraries comprising forage grass tissue collected from Lolium perenne and Festuca arundinacea. Some of the polynucleotides of the present invention may be “partial” sequences, in that they do not represent a full-length gene encoding a full-length polypeptide. Such partial sequences may be extended by analyzing and sequencing various DNA libraries using primers and/or probes and well known hybridization and/or PCR techniques. Partial sequences may be extended until an open reading frame encoding a polypeptide, a full-length polynucleotide and/or gene capable of expressing a polypeptide, or another useful portion of the genome is identified. Such extended sequences, including full-length polynucleotides and genes, are described as “corresponding to” a sequence identified as one of the sequences of SEQ ID NO: 1-62 and 125-162 or a variant thereof, or a portion of one of the sequences of SEQ ID NO: 1-62 and 125-162 or a variant thereof, when the extended polynucleotide comprises an identified sequence or its variant, or an identified contiguous portion (x-mer) of one of the sequences of SEQ ID NOS: 1-62 and 125-162 or a variant thereof. Similarly, RNA sequences, reverse sequences, complementary sequences, anti-sense sequences and the like, corresponding to the polynucleotides of the present invention, may be routinely ascertained and obtained using the cDNA sequences identified as SEQ ID NOS: 1-62 and 125-162.

[0059] The polynucleotides identified as SEQ ID NOS: 1-62 and 125-162 contain open reading frames (“ORFs”) or partial open reading frames encoding polypeptides and functional portions of polypeptides. Additionally, open reading frames encoding polypeptides may be identified in extended or full length sequences corresponding to the sequences set out as SEQ ID NOS: 1-62 and 125-162. Open reading frames may be identified using techniques that are well known in the art. These techniques include, for example, analysis for the location of known start and stop codons, most likely reading frame identification based on codon frequencies, etc. These techniques include, for example, analysis for the location of known start and stop codons, most likely reading frame identification based on codon frequencies, etc. Suitable tools and software for ORF analysis are well known in the art and include, for example, GeneWise, available from The Sanger Center, Wellcome Trust Genome Campus, Hinxton, Cambridge, CB10 1SA, United Kingdom; Diogenes, available from Computational Biology Centers, University of Minnesota, Academic Health Center, UMHG Box 43 Minneapolis Minn. 55455; and GRAIL, available from the Informatics Group, Oak Ridge National Laboratories, Oak Ridge, Tenn. Once a partial open reading frame is identified, the polynucleotide may be extended in the area of the partial open reading frame using techniques that are well known in the art until the polynucleotide for the full open reading frame is identified.

[0060] Once open reading frames are identified in the polynucleotides of the present invention, the open reading frames may be isolated and/or synthesized. Expressible genetic constructs comprising the open reading frames and suitable promoters, initiators, terminators, etc., which are well known in the art, may then be constructed. Such genetic constructs may be introduced into a host cell to express the polypeptide encoded by the open reading frame. Suitable host cells may include various prokaryotic and eukaryotic cells, including plant cells, mammalian cells, bacterial cells, algae and the like.

[0061] The polynucleotides of the present invention may be isolated by high throughput sequencing of cDNA libraries prepared from forage grass tissue, as described below in Example 1. Alternatively, oligonucleotide probes and primers based on the sequences provided in SEQ ID NOS: 1-62 and 125-162 can be synthesized as detailed below, and used to identify positive clones in either cDNA or genomic DNA libraries from forage grass tissue cells by means of hybridization or polymerase chain reaction (PCR) techniques. Hybridization and PCR techniques suitable for use with such oligonucleotide probes are well known in the art (see, for example, Mullis et al., Cold Spring Harbor Symp. Quant. Biol., 51:263, 1987; Erlich, ed., PCR technology, Stockton Press: NY, 1989; and Sambrook et al., eds., Molecular cloning: a laboratory manual, 2nd ed., CSHL Press: Cold Spring Harbor, N.Y., 1989). In addition to DNA-DNA hybridization, DNA-RNA or RNA-RNA hybridization assays are also possible. In the first case, the mRNA from expressed genes would then be detected instead of genomic DNA or cDNA derived from mRNA of the sample. In the second case, RNA probes could be used. Artificial analogs of DNA hybridizing specifically to target sequences could also be employed. Positive clones may be analyzed by restriction enzyme digestion, DNA sequencing or the like.

[0062] The polynucleotides of the present invention may also, or alternatively, be synthesized using techniques that are well known in the art. The polynucleotides may be synthesized, for example, using automated oligonucleotide synthesizers (e.g., Beckman Oligo 1000M DNA Synthesizer; Beckman Coulter Ltd., Fullerton, Calif.) to obtain polynucleotide segments of up to 50 or more nucleic acids. A plurality of such polynucleotide segments may then be ligated using standard DNA manipulation techniques that are well known in the art of molecular biology. One conventional and exemplary polynucleotide synthesis technique involves synthesis of a single stranded polynucleotide segment having, for example, 80 nucleic acids, and hybridizing that segment to a synthesized complementary 85 nucleic acid segment to produce a 5 nucleotide overhang. The next segment may then be synthesized in a similar fashion, with a 5 nucleotide overhang on the opposite strand. The “sticky” ends ensure proper ligation when the two portions are hybridized. In this way, a complete polynucleotide of the present invention may be synthesized entirely in vitro.

[0063] Oligonucleotide probes and primers complementary to and/or corresponding to SEQ ID NOS: 1-62 and 125-162, and variants of those sequences, are also comprehended by the present invention. Such oligonucleotide probes and primers are substantially complementary to the polynucleotide of interest over a certain portion of the polynucleotide. An oligonucleotide probe or primer is described as “corresponding to” a polynucleotide of the present invention, including one of the sequences set out as SEQ ID NOS: 1-62 and 125-162 or a variant thereof, if the oligonucleotide probe or primer, or its complement, is contained within one of the sequences set out as SEQ ID NOS: 1-62 and 125-162 or a variant of one of the specified sequences.

[0064] Two single stranded sequences are said to be substantially complementary when the nucleotides of one strand, optimally aligned and compared, with the appropriate nucleotide insertions and/or deletions, pair with at least 80%, preferably at least 90% to 95%, and more preferably at least 98% to 100%, of the nucleotides of the other strand. Alternatively, substantial complementarity exists when a first DNA strand will selectively hybridize to a second DNA strand under stringent hybridization conditions.

[0065] In specific embodiments, the oligonucleotide probes and/or primers comprise at least about 6 contiguous residues, more preferably at least about 10 contiguous residues, and most preferably at least about 20 contiguous residues complementary to a polynucleotide sequence of the present invention. Probes and primers of the present invention may be from about 8 to 100 base pairs in length, preferably from about 10 to 50 base pairs in length, and more preferably from about 15 to 40 base pairs in length. The probes can be easily selected using procedures well known in the art, taking into account DNA-DNA hybridization stringencies, annealing and melting temperatures, potential for formation of loops, and other factors which are well known in the art. Preferred techniques for designing PCR primers are disclosed in Dieffenbach and Dyksler, PCR Primer: a laboratory manual, CSHL Press: Cold Spring Harbor, N.Y., 1995. A software program suitable for designing probes, and especially for designing PCR primers, is available from Premier Biosoft International, 3786 Corina Way, Palo Alto, Calif. 94303-4504.

[0066] The isolated polynucleotides of the present invention also have utility in genome mapping, in physical mapping, and in positional cloning of genes.

[0067] The polynucleotides identified as SEQ ID NOS: 1-62 and 125-162 were isolated from cDNA clones and represent sequences that are expressed in the tissue from which the cDNA was prepared. RNA sequences, reverse sequences, complementary sequences, anti-sense sequences, and the like, corresponding to the polynucleotides of the present invention, may be routinely ascertained and obtained using the cDNA sequences identified as SEQ ID NOS: 1-62 and 125-162.

[0068] Identification of genomic DNA and heterologous species DNA can be accomplished by standard DNA/DNA hybridization techniques, under appropriately stringent conditions, using all or part of a polynucleotide sequence as a probe to screen an appropriate library. Alternatively, PCR techniques using oligonucleotide primers that are designed based on known genomic DNA, cDNA and protein sequences can be used to amplify and identify genomic and cDNA sequences.

[0069] In another aspect, the present invention provides isolated polypeptides encoded by the above polynucleotides. As used herein, the term “polypeptide” encompasses amino acid chains of any length, including full-length proteins, wherein the amino acid residues are linked by covalent peptide bonds. The term “polypeptide encoded by a polynucleotide” as used herein, includes polypeptides encoded by a polynucleotide that comprises a partial isolated polynucleotide sequence provided herein. In specific embodiments, the inventive polypeptides comprise an amino acid sequence selected from the group consisting of SEQ ID NO: 63-124 and 163-190, as well as variants of such sequences.

[0070] As noted above, polypeptides of the present invention may be produced recombinantly by inserting a polynucleotide sequence of the present invention encoding the polypeptide into an expression vector and expressing the polypeptide in an appropriate host. Any of a variety of expression vectors known to those of ordinary skill in the art may be employed. Expression may be achieved in any appropriate host cell that has been transformed or transfected with an expression vector containing a polynucleotide molecule that encodes a recombinant polypeptide. Suitable host cells include prokaryotes, yeast, and higher eukaryotic cells. Preferably, the host cells employed are plant, E. coli, insect, yeast, or a mammalian cell line such as COS or 293T. The polynucleotide sequences expressed in this manner may encode naturally occurring polypeptides, portions of naturally occurring polypeptides, or other variants thereof. The expressed polypeptides may be used in various assays known in the art to determine their biological activity. Such polypeptides may also be used to raise antibodies, to isolate corresponding interacting proteins or other compounds, and to quantitatively determine levels of interacting proteins or other compounds.

[0071] In a related aspect, polypeptides are provided that comprise at least a functional portion of a polypeptide having an amino acid sequence selected from the group consisting of sequences provided in SEQ ID NO: 63-124 and 163-190, and variants thereof. As used herein, the “functional portion” of a polypeptide is that portion which contains an active site essential for affecting the function of the polypeptide, for example, a portion of the molecule that is capable of binding one or more reactants. The active site may be made up of separate portions present on one or more polypeptide chains and will generally exhibit high binding affinity. Functional portions of a polypeptide may be identified by first preparing fragments of the polypeptide by either chemical or enzymatic digestion of the polypeptide, or by mutation analysis of the polynucleotide that encodes the polypeptide and subsequent expression of the resulting mutant polypeptides. The polypeptide fragments or mutant polypeptides are then tested to determine which portions retain biological activity, using methods well known to those of skill in the art, including the representative assays described below.

[0072] Portions and other variants of the inventive polypeptides may be generated by synthetic or recombinant means. Synthetic polypeptides having fewer than about 100 amino acids, and generally fewer than about 50 amino acids, may be generated using techniques well known to those of ordinary skill in the art. For example, such polypeptides may be synthesized using any of the commercially available solid-phase techniques, such as the Merrifield solid-phase synthesis method, where amino acids are sequentially added to a growing amino acid chain. See Merrifield, J. Am. Chem. Soc. 85:2149-2146, 1963. Equipment for automated synthesis of polypeptides is commercially available from suppliers such as Perkin Elmer/Applied Biosystems, Inc. (Foster City, Calif.), and may be operated according to the manufacturer's instructions. Variants of a native polypeptide may be prepared using standard mutagenesis techniques, such as oligonucleotide-directed site-specific mutagenesis (Kunkel, Proc. Natl. Acad. Sci. USA 82:488-492, 1985). Sections of DNA sequences may also be removed using standard techniques to permit preparation of truncated polypeptides.

[0073] As used herein, the term “variant” comprehends nucleotide or amino acid sequences different from the specifically identified sequences, wherein one or more nucleotides or amino acid residues is deleted, substituted, or added. Variants may be naturally occurring allelic variants, or non-naturally occurring variants. Variant sequences (polynucleotide or polypeptide) preferably exhibit at least 75%, more preferably at least 80%, more preferably at least 90%, more preferably yet at least 95% and most preferably, at least 98% identity to a sequence of the present invention. The percentage identity is determined by aligning the two sequences to be compared as described below, determining the number of identical residues in the aligned portion, dividing that number by the total number of residues in the inventive (queried) sequence, and multiplying the result by 100.

[0074] Polynucleotides and polypeptides having a specified percentage identity to a polynucleotide or polypeptide identified in one of SEQ ID NO: 1-190 thus share a high degree of similarity in their primary structure. In addition to a specified percentage identity to a polynucleotide or polypeptide of the present invention, variant polynucleotides and polypeptides preferably have additional structural and/or functional features in common with a polynucleotide of the present invention. Polynucleotides having a specified degree of identity to, or capable of hybridizing to, a polynucleotide of the present invention preferably additionally have at least one of the following features: (1) they contain an open reading frame, or partial open reading frame, encoding a polypeptide, or a functional portion of a polypeptide, having substantially the same functional properties as the polypeptide, or functional portion thereof, encoded by a polynucleotide in the recited SEQ ID NO:; or (2) they contain identifiable domains in common. Similarly, polypeptides having a specified degree of identity to a polypeptide of the present invention preferably additionally have at least one of the following features: (1) they have substantially the same functional properties as the polypeptide in the recited SEQ ID NO:; or (2) they contain identifiable domains in common.

[0075] Polynucleotide or polypeptide sequences may be aligned, and percentages of identical nucleotides or amino acids in a specified region may be determined against another polynucleotide or polypeptide, using computer algorithms that are publicly available. The BLASTN and FASTA algorithms, set to the default parameters described in the documentation and distributed with the algorithm, may be used for aligning and identifying the similarity of polynucleotide sequences. The alignment and similarity of polypeptide sequences may be examined using the BLASTP algorithm. BLASTX and FASTX algorithms compare nucleotide query sequences translated in all reading frames against polypeptide sequences. The FASTA and FASTX algorithms are described in Pearson and Lipman, Proc. Natl. Acad. Sci. USA 85:2444-2448, 1988; and in Pearson, Methods in Enzymol. 183:63-98, 1990. The FASTA software package is available from the University of Virginia by contacting the Assistant Provost for Research, University of Virginia, PO Box 9025, Charlottesville, Va. 22906-9025. The BLASTN software is available from the National Center for Biotechnology Information (NCBI), National Library of Medicine, Building 38A, Room 8N805, Bethesda, Md. 20894. The BLASTN algorithm Version 2.0.11 [Jan. 20, 2000] and Version 2.2.1 [Apr. 13, 2001] set to the default parameters described in the documentation and distributed with the algorithm, are preferred for use in the determination of polynucleotide variants according to the present invention. The use of the BLAST family of algorithms, including BLASTN, BLASTP and BLASTX, is described in the publication of Altschul et al., “Gapped BLAST and PSI-BLAST: a new generation of protein database search programs,” Nucleic Acids Res. 25:3389-3402, 1997.

[0076] The following running parameters are preferred for determination of alignments and similarities using BLASTN that contribute to the E values and percentage identity for polynucleotides: Unix running command with the following default parameters: blastall -p blastn -d embldb -e 10 -G 0 -E 0 -r 1 -v 30 -b 30 -i queryseq -o results; and parameters are: -p Program Name [String]; -d Database [String]; -e Expectation value (E) [Real]; -G Cost to open a gap (zero invokes default behavior) [Integer]; -E Cost to extend a gap (zero invokes default behavior) [Integer]; -r Reward for a nucleotide match (BLASTN only) [Integer]; -v Number of one-line descriptions (V) [Integer]; -b Number of alignments to show (B) [Integer]; -i Query File [File In]; -o BLAST report Output File [File Out] Optional.

[0077] The following running parameters are preferred for determination of alignments and similarities using BLASTP that contribute to the E values and percentage identity of polypeptide sequences: blastall -p blastp -d swissprotdb -e 10 -G 0 -E 0 -v 30 -b 30 -i queryseq -o results; the parameters are: -p Program Name [String]; -d Database [String]; -e Expectation value (E) [Real]; -G Cost to open a gap (zero invokes default behavior) [Integer]; -E Cost to extend a gap (zero invokes default behavior) [Integer]; -v Number of one-line descriptions (v) [Integer]; -b Number of alignments to show (b) [Integer]; -I Query File [File In]; -o BLAST report Output File [File Out] Optional.

[0078] The “hits” to one or more database sequences by a queried sequence produced by BLASTN, BLASTP, FASTA, or a similar algorithm, align and identify similar portions of sequences. The hits are arranged in order of the degree of similarity and the length of sequence overlap. Hits to a database sequence generally represent an overlap over only a fraction of the sequence length of the queried sequence.

[0079] As noted above, the percentage identity of a polynucleotide or polypeptide sequence is determined by aligning polynucleotide and polypeptide sequences using appropriate algorithms, such as BLASTN or BLASTP, respectively, set to default parameters; identifying the number of identical nucleic or amino acids over the aligned portions; dividing the number of identical nucleic or amino acids by the total number of nucleic or amino acids of the polynucleotide or polypeptide of the present invention; and then multiplying by 100 to determine the percentage identity. By way of example, a queried polynucleotide having 220 nucleic acids has a hit to a polynucleotide sequence in the EMBL database having 520 nucleic acids over a stretch of 23 nucleotides in the alignment produced by the BLASTN algorithm using the default parameters. The 23-nucleotide hit includes 21 identical nucleotides, one gap and one different nucleotide. The percentage identity of the queried polynucleotide to the hit in the EMBL database is thus 21/220 times 100, or 9.5%. The percentage identity of polypeptide sequences may be determined in a similar fashion.

[0080] The BLASTN and BLASTX algorithms also produce “Expect” values for polynucleotide and polypeptide alignments. The Expect value (E) indicates the number of hits one can “expect” to see over a certain number of contiguous sequences by chance when searching a database of a certain size. The Expect value is used as a significance threshold for determining whether the hit to a database indicates true similarity. For example, an E value of 0.1 assigned to a polynucleotide hit is interpreted as meaning that in a database of the size of the EMBL database, one might expect to see 0.1 matches over the aligned portion of the sequence with a similar score simply by chance. By this criterion, the aligned and matched portions of the sequences then have a probability of 90% of being related. For sequences having an E value of 0.01 or less over aligned and matched portions, the probability of finding a match by chance in the EMBL database is 1% or less using the BLASTN algorithm. E values for polypeptide sequences may be determined in a similar fashion using various polypeptide databases, such as the SwissProt database.

[0081] According to one embodiment, “variant” polynucleotides and polypeptides, with reference to each of the polynucleotides and polypeptides of the present invention, preferably comprise sequences having the same number or fewer nucleotides or amino acids than each of the polynucleotides or polypeptides of the present invention and producing an E value of 0.01 or less when compared to the polynucleotide or polypeptide of the present invention. That is, a variant polynucleotide or polypeptide is any sequence that has at least a 99% probability of being related to the polynucleotide or polypeptide of the present invention, measured as having an E value of 0.01 or less using the BLASTN or BLASTX algorithms set at the default parameters. According to a preferred embodiment, a variant polynucleotide is a sequence having the same number or fewer nucleic acids than a polynucleotide of the present invention that has at least a 99% probability of being related to the polynucleotide of the present invention, measured as having an E value of 0.01 or less using the BLASTN algorithm set at the default parameters. Similarly, according to a preferred embodiment, a variant polypeptide is a sequence having the same number or fewer amino acids than a polypeptide of the present invention that has at least a 99% probability of being related as the polypeptide of the present invention, measured as having an E value of 0.01 or less using the BLASTP algorithm set at the default parameters.

[0082] In an alternative embodiment, variant polynucleotides are sequences that hybridize to a polynucleotide of the present invention under stringent conditions. Stringent hybridization conditions for determining complementarity include salt conditions of less than about 1 M, more usually less than about 500 mM, and preferably less than about 200 mM. Hybridization temperatures can be as low as 5° C., but are generally greater than about 22° C., more preferably greater than about 30° C., and most preferably greater than about 37° C. Longer DNA fragments may require higher hybridization temperatures for specific hybridization. Since the stringency of hybridization may be affected by other factors such as probe composition, presence of organic solvents, and extent of base mismatching, the combination of parameters is more important than the absolute measure of any one alone. An example of “stringent conditions” is prewashing in a solution of 6× SSC, 0.2% SDS; hybridizing at 65° C., 6× SSC, 0.2% SDS overnight; followed by two washes of 30 minutes each in 1× SSC, 0.1% SDS at 65° C. and two washes of 30 minutes each in 0.2× SSC, 0.1% SDS at 65° C.

[0083] The present invention also encompasses polynucleotides that differ from the disclosed sequences but that, as a consequence of the discrepancy of the genetic code, encode a polypeptide having similar enzymatic activity to a polypeptide encoded by a polynucleotide of the present invention. Thus, polynucleotides comprising sequences that differ from the polynucleotide sequences recited in SEQ ID NO: 1-62 and 125-162, or complements, reverse sequences, or reverse complements of those sequences, as a result of conservative substitutions are contemplated by and encompassed within the present invention. Additionally, polynucleotides comprising sequences that differ from the polynucleotide sequences recited in SEQ ID NO: 1-62 and 125-162, or complements, reverse complements or reverse sequences thereof, as a result of deletions and/or insertions totaling less than 10% of the total sequence length are also contemplated by and encompassed within the present invention. Similarly, polypeptides comprising sequences that differ from the polypeptide sequences recited in SEQ ID NO: 63-124 and 163-190 as a result of amino acid substitutions, insertions, and/or deletions totaling less than 10% of the total sequence length are contemplated by and encompassed within the present invention, provided the variant polypeptide has activity in a lignin, fructan or tannin biosynthetic pathway.

[0084] In another aspect, the present invention provides genetic constructs comprising, in the 5′-3′ direction, a gene promoter sequence; an open reading frame coding for at least a functional portion of a polypeptide of the present invention; and a gene termination sequence. The open reading frame may be orientated in either a sense or anti-sense direction. For applications where amplification of lignin, fructan or tannin synthesis is desired, the open reading frame may be inserted in the construct in a sense orientation, such that transformation of a target organism with the construct will lead to an increase in the number of copies of the gene and therefore an increase in the amount of enzyme. When down-regulation of lignin, fructan or tannin synthesis is desired, the open reading frame may be inserted in the construct in an anti-sense orientation, such that the RNA produced by transcription of the polynucleotide is complementary to the endogenous mRNA sequence. This, in turn, will result in a decrease in the number of copies of the gene and therefore a decrease in the amount of enzyme. Alternatively, regulation may be achieved by inserting appropriate sequences or subsequences (e.g., DNA or RNA) in ribozyme constructs.

[0085] Genetic constructs comprising a non-coding region of a gene coding for a polypeptide of the present invention, or a nucleotide sequence complementary to a non-coding region, together with a gene promoter sequence and a gene termination sequence, are also provided. As used herein the term “non-coding region” includes both transcribed sequences which are not translated, and non-transcribed sequences within about 2000 base pairs 5′ or 3′ of the translated sequences or open reading frames. Examples of non-coding regions which may be usefully employed in the inventive constructs include introns and 5′-non-coding leader sequences. Transformation of a target plant with such a genetic construct may lead to a reduction in the amount of lignin, fructan or tannin synthesized by the plant by the process of cosuppression, in a manner similar to that discussed, for example, by Napoli et al., Plant Cell 2:279-290, 1990; and de Carvalho Niebel et al., Plant Cell 7:347-358, 1995.

[0086] The genetic constructs of the present invention further comprise a gene promoter sequence and a gene termination sequence, operably linked to the polynucleotide to be transcribed, which control expression of the gene. The gene promoter sequence is generally positioned at the 5′ end of the polynucleotide to be transcribed, and is employed to initiate transcription of the polynucleotide. Gene promoter sequences are generally found in the 5′ non-coding region of a gene but they may exist in introns (Luehrsen, Mol. Gen. Genet. 225:81-93, 1991). When the construct includes an open reading frame in a sense orientation, the gene promoter sequence also initiates translation of the open reading frame. For genetic constructs comprising either an open reading frame in an anti-sense orientation or a non-coding region, the gene promoter sequence consists only of a transcription initiation site having a RNA polymerase binding site.

[0087] A variety of gene promoter sequences which may be usefully employed in the genetic constructs of the present invention are well known in the art. The promoter gene sequence, and also the gene termination sequence, may be endogenous to the target plant host or may be exogenous, provided the promoter is functional in the target host. For example, the promoter and termination sequences may be from other plant species, plant viruses, bacterial plasmids and the like. Preferably, gene promoter and termination sequences are from the inventive sequences themselves.

[0088] Factors influencing the choice of promoter include the desired tissue specificity of the construct, and the timing of transcription and translation. For example, constitutive promoters, such as the 35S Cauliflower Mosaic Virus (CaMV 35S) promoter, will affect the activity of the enzyme in all parts of the plant. Use of a tissue specific promoter will result in production of the desired sense or anti-sense RNA only in the tissue of interest. With DNA constructs employing inducible gene promoter sequences, the rate of RNA polymerase binding and initiation can be modulated by external stimuli, such as light, heat, anaerobic stress, alteration in nutrient conditions and the like. Temporally regulated promoters can be employed to effect modulation of the rate of RNA polymerase binding and initiation a t a specific time during development of a transformed cell. Preferably, the original promoters from the enzyme gene in question, or promoters from a specific tissue-targeted gene in the organism to be transformed, such as Lolium or Festuca, are used. Grass promoters different from the original gene may also be usefully employed in the inventive genetic constructs in order to prevent feedback inhibition. For example, the fructosyltransferase gene will be regulated by sucrose sensing systems; therefore removing the gene from under control of its normal promoter allows the gene to be active all the time. Other examples of gene promoters which may be usefully employed in the present invention include, mannopine synthase (mas), octopine synthase (ocs) and those reviewed by Chua et al., Science 244:174-181, 1989.

[0089] The gene termination sequence, which is located 3′ to the polynucleotide to be transcribed, may come from the same gene as the gene promoter sequence or may be from a different gene. Many gene termination sequences known in the art may be usefully employed in the present invention, such as the 3′ end of the Agrobacterium tumefaciens nopaline synthase gene. However, preferred gene terminator sequences are those from the original enzyme gene or from the target species to be transformed.

[0090] The genetic constructs of the present invention may also contain a selection marker that is effective in plant cells, to allow for the detection of transformed cells containing the inventive construct. Such markers, which are well known in the art, typically confer resistance to one or more toxins. One example of such a marker is the NPTII gene whose expression results in resistance to kanamycin or hygromycin, antibiotics which are usually toxic to plant cells at a moderate concentration (Rogers et al., in Weissbach A and H, eds., Methods for Plant Molecular Biology, Academic Press Inc.: San Diego, Calif., 1988). Alternatively, the presence of the desired construct in transformed cells can be determined by means of other techniques well known in the art, such as Southern and Western blots.

[0091] Techniques for operatively linking the components of the inventive genetic constructs are well known in the art and include the use of synthetic linkers containing one or more restriction endonuclease sites as described, for example, by Sambrook et al., (Molecular cloning: a laboratory manual, CSHL Press: Cold Spring Harbor, N.Y., 1989). The genetic construct of the present invention may be linked to a vector having at least one replication system, for example, E. coli, whereby after each manipulation, the resulting construct can be cloned and sequenced and the correctness of the manipulation determined.

[0092] The genetic constructs of the present invention may be used to transform a variety of plants, both monocotyledonous (e.g., grasses, maize/corn, grains, oats, rice, sorghum, millet, rye, sugar cane, wheat and barley), dicotyledonous (e.g., Arabidopsis, tobacco, legumes, alfalfa, oaks, eucalyptus, maple), and gymnosperms. In a preferred embodiment, the inventive genetic constructs are employed to transform grasses. Preferably the target plant is selected from the group consisting of Lolium and Festuca species, most preferably from the group consisting of Lolium perenne and Festuca arundinacea. Other plants that may be usefully transformed with the inventive genetic constructs include other species of ryegrass and fescue, including, but not limited to Lolium multiflorum (Italian ryegrass), Lolium hybridum (hybrid ryegrass), Lolium rigidum (Wimerra grass), Lolium temulentum (darnel), Festuca rubra (red fescue) and Festuca pratensis (meadow fescue). As discussed above, transformation of a plant with a genetic construct of the present invention will produce a modified lignin, fructan or tannin content in the plant.

[0093] The production of RNA in target cells may be controlled by choice of the promoter sequence, or by selecting the number of functional copies or the site of integration of the polynucleotides incorporated into the genome of the target organism. A target plant may be transformed with more than one construct of the present invention, thereby modulating the lignin, fructan and/or tannin biosynthetic pathways by affecting the activity of more than one enzyme, affecting enzyme activity in more than one tissue or affecting enzyme activity at more than one expression time. Similarly, a construct may be assembled containing more than one open reading frame coding for an enzyme encoded by a polynucleotide of the present invention or more than one non-coding region of a gene coding for such an enzyme. The polynucleotides of the present invention may also be employed in combination with other known sequences encoding enzymes involved in the lignin, fructan and/or tannin biosynthetic pathways. In this manner, more than one biosynthetic pathway may be modulated, or a lignin, fructan or tannin biosynthetic pathway may be added to a plant to produce a plant having an altered phenotype.

[0094] Techniques for stably incorporating genetic constructs into the genome of target plants are well known in the art and include Agrobacterium tumefaciens mediated introduction, electroporation, protoplast fusion, injection into reproductive organs, injection into immature embryos, high velocity projectile introduction and the like. The choice of technique will depend upon the target plant to be transformed. For example, dicotyledonous plants and certain monocots and gymnosperms may be transformed by Agrobacterium Ti plasmid technology, as described, for example by Bevan, Nucleic Acid Res. 12:8711-8721, 1984. Targets for the introduction of the genetic constructs of the present invention include tissues, such as leaf tissue, disseminated cells, protoplasts, seeds, embryos, meristematic regions; cotyledons, hypocotyls, and the like. Transformation techniques which may be usefully employed in the inventive methods include those taught by Ellis et al., Plant Cell Reports, 8:16-20, 1989; Wilson et al., Plant Cell Reports 7:704-707, 1989; Tautorus et al., Theor. Appl. Genet. 78:531-536, 198; Hiei et al., Plant J. 6:271-282, 1994; and Ishida et al., Nature Biotechnol. 14:745-750, 1996; U.S. Pat. No. 5,591,616; and European Patent Publication EP 672 752 A1. Once the cells are transformed, cells having the inventive DNA construct incorporated in their genome may be selected by means of a marker, such as the kanamycin resistance marker discussed above. Transgenic cells may then be cultured in an appropriate medium to regenerate whole plants, using techniques well known in the art. In the case of protoplasts, the cell wall is allowed to reform under appropriate osmotic conditions. In the case of seeds or embryos, an appropriate germination or callus initiation medium is employed. For explants, an appropriate regeneration medium is used. Regeneration of plants is well established for many species. The resulting transformed plants may be reproduced sexually or asexually, using methods well known in the art, to give successive generations of transgenic plants.

[0095] Polynucleotides of the present invention may also be used to specifically suppress gene expression by methods that operate post-transcriptionally to block the synthesis of products of targeted genes, such as RNA interference (RNAi), and quelling. For a review of techniques of gene suppression see Science, 288:1370-1372, 2000. Exemplary gene silencing methods are also provided in WO 99/49029 and WO 99/53050. Posttranscriptional gene silencing is brought about by a sequence-specific RNA degradation process which results in the rapid degradation of transcripts of sequence-related genes. Studies have provided evidence that double-stranded RNA may act as a mediator of sequence-specific gene silencing (see, e.g., review by Montgomery and Fire, Trends in Genetics, 14: 255-258, 1998). Gene constructs that produce transcripts with self-complementary regions are particularly efficient at gene silencing. A unique feature of this posttranscriptional gene silencing pathway is that silencing is not limited to the cells where it is initiated. The gene-silencing effects may be disseminated to other parts of an organism and even transmitted through the germ line to several generations.

[0096] The polynucleotides of the present invention may be employed to generate gene silencing constructs and or gene-specific self-complementary RNA sequences that can be delivered by conventional art-known methods to plant tissues, such as forage grass tissues. Within genetic constructs, sense and antisense sequences can be placed in regions flanking an intron sequence in proper splicing orientation with donor and acceptor splicing sites, such that intron sequences are removed during processing of the transcript and sense and antisense sequences, as well as splice junction sequences, bind together to form double-stranded RNA. Alternatively, spacer sequences of various lengths may be employed to separate self-complementary regions of sequence in the construct. During processing of the gene construct transcript, intron sequences are spliced-out, allowing sense and anti-sense sequences, as well as splice junction sequences, to bind forming double-stranded RNA. Select ribonucleases bind to and cleave the double-stranded RNA, thereby initiating the cascade of events leading to degradation of specific mRNA gene sequences, and silencing specific genes. Alternatively, rather than using a gene construct to express the self-complementary RNA sequences, the gene-specific double-stranded RNA segments are delivered to one or more targeted areas to be internalized into the cell cytoplasm to exert a gene silencing effect. Gene silencing RNA sequences comprising the polynucleotides of the present invention are useful for creating genetically modified plants with desired phenotypes as well as for characterizing genes (e.g., in high-throughput screening of sequences), and studying their functions in intact organisms.

### EXAMPLE 1

### Isolation of cDNA Sequences from L. perenne and F. arundinacea cDNA Libraries

[0097] L. perenne and F. arundinacea cDNA expression libraries were constructed and screened as follows. Tissue was collected from L. perenne and F. arundinacea during winter and spring, and snap-frozen in liquid nitrogen. The tissues collected include those obtained from leaf blades, leaf base, pseudostem, floral stems, inflorescences, roots and stem. Total RNA was isolated from each tissue type using TRIzol Reagent (BRL Life Technologies, Gaithersburg, Md.). mRNA from each tissue type was obtained using a Poly(A) Quik mRNA isolation kit (Stratagene, La Jolla, Calif.), according to the manufacturer's specifications. cDNA expression libraries were constructed from the purified mRNA by reverse transcriptase synthesis followed by insertion of the resulting cDNA in Lambda ZAP using a ZAP Express cDNA Synthesis Kit (Stratagene, La Jolla, Calif.), according to the manufacturer's protocol. T he resulting cDNA clones were packaged using a Gigapack II Packaging Extract (Stratagene, La Jolla, Calif.) employing 1 μl of sample DNA from the 5 μl ligation mix. Mass excision of the libraries was done using XL1-Blue MRF′ cells and XLOLR cells (Stratagene, La Jolla, Calif.) with ExAssist helper phage (Stratagene, La Jolla, Calif.). The excized phagemids were diluted with NZY broth (Gibco BRL, Gaithersburg, Md.) and plated out onto LB-kanamycin agar plates containing 5-bromo-4-chloro-3-indolyl-beta-D-galactosidase (X-gal) and isopropylthio-beta-galactoside (IPTG). Of the colonies plated and picked for DNA preparations, the large majority contained an insert suitable for sequencing. Positive colonies were cultured in NZY broth with kanamycin and DNA was purified following standard protocols. Agarose gel at 1% was used to screen sequencing templates for chromosomal contamination. Dye terminator sequences were prepared using a Biomek 2000 robot (Beckman Coulter Inc., Fullerton, Calif.) for liquid handling and DNA amplification using a 9700 PCR machine (Perkin Elmer/Applied Biosystems, Foster City, Calif.) according to the manufacturer's protocol.

[0098] The DNA sequences for positive clones were obtained using a Perkin Elmer/Applied Biosystems Division Prism 377 sequencer. cDNA clones were sequenced from the 5′ end. The polynucleotide sequences identified as SEQ ID NO: 4, 6, 11, 127, 128 and 132 were identified from L. perenne leaf cDNA expression libraries; the polynucleotide sequences identified as SEQ ID NO: 1, 14, 15, 26, 32, 36, 38, 41, 49, 125, 134, 141, 144, 147, and 150 were identified from L. perenne vegetative stem cDNA expression libraries; the polynucleotide sequences identified as SEQ ID NO: 17, 22, 25, 138, and 140 were identified from L. perenne leaf and pseudostem cDNA expression libraries; the polynucleotide sequences identified as SEQ ID NO: 43, 57, 61, 157, and 161 were identified from L. perenne pseudostem cDNA expression libraries; the polynucleotide sequences identified as SEQ ID NO: 10, 12, 28, 30, 34, 44, 60, 131, 133, 142, 143, 145, 151, and 160 were identified from L. perenne floral stem cDNA expression libraries; the polynucleotide sequences identified as SEQ ID NO: 8, 18, 46, 52, 53, 55, 59, 136, 152, 155, 156, 159, and 162 were identified from L. perenne stem cDNA expression libraries; the polynucleotide sequences identified as SEQ ID NO: 51 and 154 were identified from a L. perenne root cDNA expression library; the polynucleotide sequences identified as SEQ ID NO: 24, 27 and 139 were identified from L. perenne leaf blade cDNA expression libraries; the polynucleotide sequences identified as SEQ ID NO: 9, 37, 39, 40, 45, 130, 148, and 149 were identified from F. arundinacea basal leaf cDNA expression libraries; the polynucleotide sequences identified as SEQ ID NO: 19, 21, 29, 33, 35, 47, 48, and 153 were identified from F. arundinacea combined day 3 and day 6 basal leaves cDNA expression libraries; the polynucleotide sequence identified as SEQ ID NO: 54 was identified from a F. arundinacea combined day 3 and day 6 leaves cDNA expression library; the polynucleotide sequence identified as SEQ ID NO: 56 was identified from a F. arundinacea inflorescence cDNA expression library; the polynucleotide sequences identified as SEQ ID NO: 20 and 137 were identified from a subtracted F. arundinacea leaf blade cDNA expression library; the polynucleotide sequences identified as SEQ ID NO: 7, 23, 42, 50, 62, and 129 were identified from F. arundinacea pseudostem cDNA expression libraries; the polynucleotide sequences identified as SEQ ID NO: 2, 13, 16 and 135 were identified from F. arundinacea leaf cDNA expression libraries; and the polynucleotide sequences identified as SEQ ID NO: 3, 5, 31, and 126 were identified from a F. arundinacea inflorescence day 0 cDNA expression library.

[0099] BLASTN Polynucleotide Analysis

[0100] The isolated cDNA sequences were compared to sequences in the EMBL DNA database using the computer algorithm BLASTN. Comparisons of DNA sequences provided in SEQ ID NOS: 1-62 to sequences in the EMBL DNA database were made as of Oct. 19, 2001 using BLASTN algorithm Version 2.0.11 [Jan. 20, 2000], and the following Unix running command: blastall -p blastn d embldb -e 10-G0 -E0 -r 1 -v 30 b 30 -i queryseq -o. Comparisons of DNA sequences provided in SEQ ID NOS: 125-162 to sequences in the EMBL DNA database were made using BLASTN algorithm Version 2.2.1 [Apr. 13, 2001], and the following Unix running command: blastall -p blastn -d embldb -F F -e 10 -G0 -E0 -r 1 -v 2-b 2 -i queryseq -o.

[0101] The sequences of SEQ ID NO: 4-6, 9-11, 17-19, 21-26, 33, 44, 45, 48, 49, 51-55, 59, 60, 130-132, 136, 139, 146, 151, 154-156, 159, and 162 were determined to have less than 50% identity to sequences in the EMBL database using the computer algorithm BLASTN, as described above. The sequences of SEQ ID NO: 2, 3, 7, 8, 14, 16, 36-38, 46, 47, 50, 56-58, 61, 129, 135, 137, 138, 152, 153, 157, 158, 160 and 161 were determined to have less than 75% identity to sequences in the EMBL database using the computer algorithm BLASTN, as described above. The sequences of SEQ ID NOS: 1, 12, 13, 15, 20, 28, 31, 32, 35, 40, 62, 125-128, 133, 134, 142, 144 and 147 were determined to have less than 90% identity to sequences in the EMBL database using the computer algorithm BLASTN, as described above. Finally, the sequences of SEQ ID NOS: 29, 30, 39, 41-43, 141, 143, 148, and 149 were determined to have less than 98% identity to sequences in the EMBL database using the computer algorithm BLASTN, as described above.

[0102] BLASTP Polypeptide Analysis

[0103] The protein sequences corresponding to the isolated cDNA sequences were compared to sequences in the SwissProt/Trembl protein database using the computer algorithm BLASTP. Comparisons of protein sequences provided in SEQ ID NOS: 63-124 to sequences in the SwissProt/Trembl protein database were made as of Oct. 19, 2001 using BLASTP algorithm Version 2.0.11 [Jan. 20, 2000], and the following Unix running command: blastall -p blastp -dstdb-e 10 -G0 -E0 -v 30 -b 30 -i queryseq -o. Comparisons of protein sequences provided in SEQ ID NOS: 163-190 to sequences in the SwissProt/Trembl protein database were made using BLASTP algorithm Version 2.2.1 [Apr. 13, 2001], and the following Unix running command: blastall -p blastp dstdb -F F -e 10 -G0 -E0 v 2 -b 2 -i queryseq -o.

[0104] The sequences of SEQ ID NOS: 65-68, 72, 73, 78, 80, 81, 84, 85, 87, 88, 106, 107, 110, 111, 113-115, 117, 118 and 121 were determined to have less than 50% identity to sequences in the SwissProt/Trembl database using the computer algorithm BLASTP, as described above. The sequences of SEQ ID NOS: 71, 79, 82, 83, 86, 95, 98-100, 112, 116, 120, 122-124, 167, 168, 171-174, 185, 188, and 190 were determined to have less than 75% identity to sequences in the SwissProt/Trembl database using the computer algorithm BLASTP, as described above. The sequences of SEQ ID NOS: 63, 64, 69, 70, 74-77, 90, 91, 93, 94, 97, 101, 102, 104, 108, 109, 119, 175, 183, 187, and 189 were determined to have less than 90% identity to sequences in the SwissProt/Trembl database using the computer algorithm BLASTP, as described above. Finally, the sequences of SEQ ID NOS: 89, 92, 96, 103, 105, 163-165, 169, 170, 177, 179, 181, 184, and 186 were determined to have less than 98% identity to sequences in the SwissProt/Trembl database using the computer algorithm BLASTP, as described above.

[0105] BLASTX Polynucleotide Analysis

[0106] The isolated cDNA sequences were compared to sequences in the SwissProt/Trembl protein database using the computer algorithm BLASTX. Comparisons of DNA sequences provided in SEQ ID NOS: 1-62 to sequences in the SwissProt/Trembl protein database were made as of Oct. 19, 2001 using BLASTX algorithm Version 2.0.11 [Jan. 20, 2000], and the following Unix running command: blastall -p blastx -dstdb -e 10 -G0 -E0 -v 30 -b 30 -i queryseq -o. Comparisons of DNA sequences provided in SEQ ID NOS: 1-62 to sequences in the SwissProt/Trembl protein database were made using BLASTX algorithm Version 2.2.1 [Apr. 13, 2001], and the following Unix running command: blastall -p blastx -d stdb -F F -e 10 -G0 -E0 -v 2 -b 2 -i queryseq -o. The sequences of SEQ ID NOS: 11, 44, 45, 48, 49, 51, 52, 55, 130, 132, 155, 156, and 162 were determined to have less than 50% identity to sequences in the abase using the computer algorithm BLASTX, as described above. The NOS: 3-10, 16-26, 33, 36-38, 40-43, 50, 53, 54, 56, 58-62, 129, 131, 135-139, 146, 150, 151, 154, and 158-161 were determined to have less than 75% identity to sequences in the SwissProt/Trembl database using the computer algorithm BLASTX, as described above. sequences of SEQ ID NOS: 1, 2, 12-15, 27, 28-32, 34, 35, 39, 46, 47, 57, 125-128, 133, 134, 141-145, 147-149, 152, 153, and 157 were determined to have less than 90% identity to sequences in the SwissProt/Trembl database using the computer algorithm BLASTX, as described above. Finally, the sequence of SEQ ID NO: 140 was determined to have less than 98% identity to sequences in the SwissProt/Trembl database using the computer algorithm BLASTX, as described above.

[0107] The location of open reading frames (ORFs), by nucleotide position, contained within the sequences of SEQ ID NO: 1-62 and 125-162, and the corresponding amino acid sequences are provided in Table 2 below. SEQ ID NO: 1-8, 10-15, 17, 19, 21, 23-25, 28-52, 54-59, 61-62 and 125-162 are believed to contain full-length ORFs.

TABLE 2

| POLYNUCLEOTIDE | | POLYPEPTIDE |
|---|---|---|
| SEQ ID NO: | ORF | SEQ ID NO: |
| 1 | 56-2,020 | 63 |
| 2 | 64-2,010 | 64 |
| 3 | 64-1,926 | 65 |
| 4 | 74-1,945 | 66 |
| 5 | 40-1,911 | 67 |
| 6 | 79-1,938 | 68 |
| 7 | 246-1,514 | 69 |
| 8 | 264-1,532 | 70 |
| 9 | 84-3,272 | 71 |
| 10 | 73-3,297 | 72 |
| 11 | 129-2,942 | 73 |
| 12 | 46-2,472 | 74 |
| 13 | 113-2,539 | 75 |
| 14 | 61-2,505 | 76 |
| 15 | 103-2,253 | 77 |
| 16 | 3-1,439 | 78 |
| 17 | 26-1,777 | 79 |
| 18 | 2-1,174 | 80 |
| 19 | 59-1,852 | 81 |
| 20 | 2-1,201 | 82 |
| 21 | 1-1,779 | 83 |
| 22 | 198-1,097 | 84 |
| 23 | 27-1,772 | 85 |
| 24 | 36-1,802 | 86 |
| 25 | 78-2,084 | 87 |
| 26 | 2-1,423 | 88 |
| 27 | 3-1,622 | 89 |
| 28 | 85-1,764 | 90 |
| 29 | 72-1,751 | 91 |
| 30 | 127-1,800 | 92 |
| 31 | 137-1,810 | 93 |
| 32 | 62-1,567 | 94 |
| 33 | 80-1,597 | 95 |
| 34 | 32-1,117 | 96 |
| 35 | 86-1,171 | 97 |
| 36 | 55-852 | 98 |
| 37 | 75-872 | 99 |
| 38 | 149-1,240 | 100 |
| 39 | 90-1,118 | 101 |
| 40 | 28-1,110 | 102 |
| 41 | 66-1,148 | 103 |
| 42 | 64-1,146 | 104 |
| 43 | 85-1,170 | 105 |
| 44 | 88-1,683 | 106 |
| 45 | 93-1,721 | 107 |
| 46 | 111-2,246 | 108 |
| 47 | 144-2,285 | 109 |
| 48 | 22-993 | 110 |
| 49 | 4-1,038 | 111 |
| 50 | 87-1,067 | 112 |
| 51 | 59-1,135 | 113 |
| 52 | 18-1,052 | 114 |
| 53 | 1-882 | 115 |
| 54 | 80-1,015 | 116 |
| 55 | 322-1,014 | 117 |
| 56 | 172-762 | 118 |
| 57 | 118-1,299 | 119 |
| 58 | 5-595 | 120 |
| 59 | 14-1,003 | 121 |
| 60 | 1-987 | 122 |
| 61 | 65-1,174 | 123 |
| 62 | 103-1,245 | 124 |
| 125 | 55-2,019 | 163 |
| 126 | 63-1,925 | 164 |
| 127 | 73-1,944 | 165 |
| 128 | 71-1,930 | 166 |
| 131 | 72-3,299 | 167 |
| 132 | 134-2,950 | 168 |
| 133 | 45-2,471 | 169 |
| 134 | 65-2,512 | 170 |
| 135 | 74-1,819 | 171 |
| 136 | 170-1,855 | 172 |
| 137 | 28-1,770 | 173 |
| 138 | 26-1,733 | 174 |
| 139 | 35-1,801 | 175 |
| 140 | 71-2,083 | 176 |
| 141 | 63-1,607 | 177 |
| 143 | 126-1,799 | 178 |
| 144 | 61-1,566 | 179 |
| 145 | 67-1,152 | 180 |
| 147 | 148-1,239 | 181 |
| 149 | 27-1,109 | 182 |
| 151 | 87-1,718 | 183 |
| 153 | 143-2,284 | 184 |
| 156 | 46-1,017 | 185 |
| 157 | 117-1,313 | 186 |
| 158 | 81-1,193 | 187 |
| 159 | 12-1,001 | 188 |
| 160 | 26-1,018 | 189 |
| 162 | 50-1,027 | 190 |

[0108] SEQ ID NO: 125 and 163 are related to SEQ ID NO: 1 and 63, respectively; SEQ ID NO: 126 and 164 are related to SEQ ID NO: 3 and 65, respectively; SEQ ID NO: 127 and 165 are related to SEQ ID NO: 4 and 66, respectively; SEQ ID NO: 128 and 166 are related to SEQ ID NO: 6 and 68, respectively; SEQ ID NO: 129 is an extended sequence of SEQ ID NO: 7; SEQ ID NO: 130 is an extended sequence of SEQ ID NO: 9; SEQ ID NO: 131 and 167 are related to SEQ ID NO: 10 and 72, respectively; SEQ ID NO: 132 and 168 are related to SEQ ID NO: 11 and 73, respectively; SEQ ID NO: 133 and 169 are related to SEQ ID NO: 12 and 74, respectively; SEQ ID NO: 134 and 170 are related to SEQ ID NO: 14 and 76, respectively; SEQ ID NO: 135 and 171 are full-length sequences of SEQ ID NO: 16 and 78, respectively; SEQ ID NO: 136 and 172 are full-length sequences of SEQ ID NO: 18 and 80, respectively; SEQ ID NO: 137 and 173 are related to SEQ ID NO: 20 and 82, respectively; SEQ ID NO: 138 and 174 are full-length sequences of SEQ ID NO: 22 and 84, respectively; SEQ ID NO: 139 and 175 are related to SEQ ID NO: 24 and 86, respectively; SEQ ID NO: 140 and 176 are related to SEQ ID NO: 25 and 87, respectively; SEQ ID NO: 141 and 177 are full-length sequences of SEQ ID NO: 26 and 88, respectively; SEQ ID NO: 142 is related to SEQ ID NO: 28 and encodes the same amino acid sequence; SEQ ID NO: 143 and 178 are related to SEQ ID NO: 30 and 92, respectively; SEQ ID NO: 144 and 179 are related to SEQ ID NO: 32 and 94, respectively; SEQ ID NO: 145 and 180 are full-length sequences of SEQ ID NO: 34 and 96, respectively; SEQ ID NO: 146 is related to SEQ ID NO: 36 and encodes the same amino acid sequence; SEQ ID NO: 147 and 181 are related to SEQ ID NO: 38 and 100, respectively; SEQ ID NO: 148is related t o SEQ ID NO: 39, and encodes the same amino acid sequence; SEQ ID NO: 149 and 182 are related to SEQ ID NO: 40 and 102, respectively; SEQ ID NO: 150 is related to SEQ ID NO: 41 and encodes the same amino acid sequence; SEQ ID NO: 151 and 183 is related to SEQ ID NO: 44 and 106, respectively; SEQ ID NO: 152 is related to SEQ ID NO: 46, and encodes the same amino acid sequence; SEQ ID NO: 153 and 184 are related to SEQ ID NO: 47 and 109, respectively; SEQ ID NO: 154 is related to SEQ ID NO: 51, and encodes the same amino acid sequence; SEQ ID NO: 155 is related to SEQ ID NO: 52, and encodes the same amino acid sequence; SEQ ID NO: 156 and 185 are full-length sequences of SEQ ID NO: 53 and 115, respectively; SEQ ID NO: 162 and 190 are variants of SEQ ID NO: 156 and 185, respectively, with a difference in the 5′ region of SEQ ID NO: 156 and 162; SEQ NO: 157 and 186 are related to SEQ ID NO: 57 and 119, respectively; SEQ ID NO: 158 and 187 are related to SEQ ID NO: 58 and 120, respectively; SEQ ID NO: 159 and 188 are full-length sequences of SEQ ID NO: 59 and 121, respectively; SEQ ID NO: 160 and 189 are full-length sequences of SEQ ID NO: 60 and 122, respectively; and SEQ ID NO: 161 is related to SEQ ID NO: 61 and encodes the same amino acid sequence.

### EXAMPLE 2

### Use of Sucrose Phosphate Phosphatase to Dephosphorylate Sucrose-6-Phosphate

[0109] The F. arundinacea and L. perenne FaSPP and LpSPP genes (SEQ ID NO: 7 and 8, respectively) share amino acid sequence identity with sucrose-6-phosphate phosphatase genes from other plant species (Lunn et al., Proc. Natl. Acad. Sci. USA 97:12914-12919, 2000). These genes were amplified by PCR using the primers given in SEQ ID NO: 191 and 192 to add an initiating methionine, and then cloned into the pET41a expression plasmid (Novagen, Madison, Wis.). These primers amplified nucleotides 263-1531 and 280-1548 for FaSPP and LpSPP, respectively. The resulting plasmids were transformed into E. coli BL21 cells using standard protocols, and protein expression was induced using IPTG.

[0110] The soluble recombinant protein was assayed for its ability to specifically dephosphorylate sucrose-6-phosphate (Suc-6-P) but not fructose-6-phosphate (Fru-6-P) using the procedure described by Lunn et al. (ibid.). The release of phosphate from Suc-6P and Fru-6-P was measured using the Fiske-Subbarow method of determining inorganic phosphate (SIGMA assay kit; Sigma, St Louis, Mich.), with the change in absorbance at 660 nm being proportional to the amount of phosphate released per unit time. As shown in FIG. 1, both the Festuca and Lolium SPP enzymes dephosphorylated Suc-6-P but not Fru-6-P, whereas control pET41 extract had no activity on either substrate.

### EXAMPLE 3

### Peroxidase Activity of Grass Enzymes Demonstrated by Their Ability to Oxidize 2,2′Azino-Bis.3-Ethylbenzylthiazoline-6-Sulfonic Acid (Abts)

[0111] A number of L. perenne or F. arundinacea genes (SEQ ID NO: 48-54) share amino acid identity with peroxidase genes from other plant species (Hiraga et al., Plant Cell Physiol. 42:462-468, 2001). The putative amino acid secretion signal sequence was identified by signalP analysis of the Lolium and Festuca sequences and homology to known peroxidase proteins. Primers were designed to amplify DNA representing the mature protein (minus signal sequence; Table 3.). These genes were amplified by PCR to add an initiating methionine and then cloned into the pET25b expression plasmid (Novagen, Madison, Wis.). The resulting plasmid was transformed into E. coli AD494 (DE3) pLysS cells using standard protocols, and protein expression was induced using IPTG.

TABLE 3

| | | | Primers | | |
|---|---|---|---|---|---|
| SEQ ID NO | SEQ ID NO | | SEQ | DNA bp | Protein |
| DNA | PROT | Gene | ID NO: | amplified | codons |
| 50 | 112 | FaPER3 | 193 | 156-1077 | 24-326 |
| | | | 194 | | |
| 52 | 114 | LpPER5 | 195 | 120-1052 | 35-344 |
| | | | 196 | | |

[0112] The insoluble recombinant protein was solubilized and re-folded following protocols described for several recombinant Arabidopsis peroxidases (Teilum et al., Protein Exp. and Purif. 15:77-82, 1999). The insoluble inclusion bodies within E. coli were isolated from lysed cells by standard protocols and the recombinant protein solubilized in 8M urea. The solubilized peroxidase protein was refolded to gain active enzyme by diluting urea to 2M with 5 μM Heme, 0.25mM Glutathione reduced, and 0.45mM Glutathione oxidized, pH 8 (20 mM Tris-HCl). The refolded protein was used directly to assay peroxidase activity.

[0113] Peroxidase activity was measured by incubating recombinant peroxidase with pre-mixed ABTS/H₂O₂ liquid substrate (Sigma, St Louis, Mich.) and measuring ABTS oxidation by the increase in absorbance at 405 nm. Horseradish peroxidase of known activity (Sigma, St Louis, Mich.) was used as a positive control and boiled samples as a negative control. The results provided in FIG. 2 show that FaPER3 and LpPER5 (SEQ ID NO: 50 and 52, respectively) had similar activity to that of horseradish peroxidase in these assays.

### EXAMPLE 4

### Use of Grass Fructosyltransferase Genes to Synthesize Fructans

[0114] Transformation of N. benthamiana Plants with Fructosyltransferase Genes

[0115] Sense constructs containing a polynucleotide including the coding region of fructosyltransferase genes isolated from L. perenne Lp1-SST and Lp6SFT1 (SEQ ID NO: 125 and 126, respectively) were inserted into a pART27 derived binary vector and used to transform A. tumefaciens LBA4404 using published methods (see, An et al., “Binary Vectors,” in Gelvin and Schilperoort, eds., Plant Molecular Biology Manual, Kluwer Academic Publishers: Dordrecht, 1988). The presence and integrity of the binary vector in A. tumefaciens was verified by polymerase chain reaction (PCR). The primers px17 (SEQ ID NO: 207) and px18 (SEQ ID NO: 208) were used to confirm the presence of the Lp1-SST construct, whereas the primers px19 (SEQ ID NO: 209) and px 20 (SEQ ID NO: 210) were used to confirm the presence of the Lp6-SFT-1 construct.

[0116] The A. tumefaciens containing the sense gene constructs were used to transform N. benthamiana leaf discs (Burow et al., Plant Mol. Biol. Report 8:124-139, 1990). Several independent transformed plant lines were established for the sense construct for each fructosyltransferase gene. DNA was isolated from transformed plants containing the appropriate fructosyltransferase gene construct using the QIAGEN DNAeasy Plant Mini Kit (Qiagen, Valencia, Calif.). Presence of the fructosyltransferase gene was verified using PCR experiments as shown in FIGS. 3 and 4. For the Lp6-SFT1 gene, the forward and reverse primers given in SEQ ID NO: 197 and 198 were used, respectively. These primers amplify nucleotides 1572-1980 of the Lp6-SFT1 gene which corresponds to a 406 base pair fragment. For Lp1-SST, the forward and reverse primers given in SEQ ID NO: 199 and 200 were used, respectively. These primers amplify nucleotides 1332-1740 of Lp1-SST, corresponding to a 414 base pair fragment.

[0117] Effects of Fructosyltransferase Genes on Fructosyltransferase Concentration in Transformed Plants

[0118] Fructans are not normally found in N. benthamiana plants; hence, if introduction of the sense fructosyltransferase constructs was successful, it should be possible to extract fructans from the transformed plants. The concentration of fructosyltransferase in the transformed plants was determined using the Fructan Assay Kit (Megazyme International Ireland Ltd, Wicklow, Ireland). Briefly, 300 mg of leaf material from the independent transformed plant lines containing the fructosyltransferase sense constructs were extracted individually at 80° C. with 1 ml 80% ethanol, followed by two 1 ml extractions with water. The ethanol and water extracts were combined and frozen overnight at −20° C. Extracts were centrifuged at 20,000 g to pellet chlorophyll. Clarified extracts were treated with 1% PVP-40 to precipitate phenolic compounds. These extracts were then reduced in volume by rotary evaporation.

[0119] Fructan levels were determined in these extracts using the Megazyme Fructan Assay kit. Briefly, sucrose, starch and reducing sugars are removed from the plant carbohydrate extracts by using sucrase, β-amylase, pullulanase and maltase, and then converting the resulting reducing sugars to sugar alcohols. The remaining fructans are hydrolyzed with fructanase and the reducing sugars produced (glucose and fructose) are measured by the 4-hydroxybenzoic acid hydrazide (PAHBAH) reducing sugar method. The final extracts are assayed for absorbance at 410 nm. As shown in FIG. 5, fructans could be detected in both the Lp1-SST and Lp6-SFT-1 transgenic lines. Fructan levels were highest in lines 07, 09 and 12 for Lp1-SST, and lines 05 and 12 for Lp6SFT-1.

### EXAMPLE 5

### Use of Sucrose Phosphate Synthase Enzymes to Synthesize Sucrose

[0120] A F. arundinacea gene (FaSPS-N; SEQ ID NO: 9) has been identified that shares amino acid sequence identity with sucrose phosphate synthase (SPS) from other plant species. SEQ ID NO: 7 and 8 are also SPS sequences, with SEQ ID NO: 7 being a Lolium perenne homologue of SEQ ID NO: 9. The FaSPS-N was cloned into the pcDNA3 mammalian expression plasmid and the resulting plasmid transfected into 293T mammalian cells (human embryonic kidney derived cells) using Lipofectamine 2000 reagent (Invitrogen, Carlsbad, Calif.).

[0121] Cell lysates from transfected cells were deionized on G25 spin columns and used in a sucrose synthesis assay. In this assay, mammalian cell extracts were tested for their ability to synthesize sucrose from fructose-6-phosphate and uridine 5′-diphosphoglucose. Following the synthesis reaction, hexoses were converted to sugar alcohols by boiling in the presence of 30% KOH. The sucrose synthesized was detected by the addition of 1.4% anthrone reagent in H₂SO₄ and incubating at 40° C. for 20 min. The change in absorbance at 620 nm is relative to sucrose in the reaction (Botha and Black, Aust. J. Plant Physiol. 27:81-85, 2000). In these experiments, introducing FaSPS-N alone into mammalian cells produced a sucrose synthesis activity that was not detected in non-transfected cells (FIG. 6).

[0122] A known cofactor for SPS is SPP. To test whether SPP is required for SPS activity, the L. perenne LpSPP gene (SEQ ID NO: 8) was cloned into the pcDNA3 mammalian expression plasmid. Both the FaSPS-N and LpSPP plasmids were co-transfected into 293T mammalian cells using Lipofectamine 2000 reagent (Invitrogen, Carlsbad, Calif.). Cell lysates from transfected cells were deionized on G25 spin columns and used in a sucrose synthesis assay as described above. As shown in FIG. 6, adding SPP did not significantly enhance or alter the sucrose synthesis activity of the cell extracts.

### EXAMPLE 6

### Use of Soluble Sucrose Synthase Enzymes to Cleave Sucrose

[0123] A F. arundinacea gene (FaSUS-1; SEQ ID NO: 13) was identified that shared amino acid sequence identity with soluble sucrose synthase enzymes (SUS) from other plant species. Three other soluble sucrose synthases were also identified (SEQ ID NO: 12, 14 and 15) with SEQ ID NO. 12 being a direct homologue from L. perenne. The FaSUS-1 gene was cloned into the pcDNA3 mammalian expression plasmid, which was transiently transfected into 293T mammalian cells (human embryonic kidney derived cells) using Lipofectamine 2000 reagent (Invitrogen Carlsbad, Calif.). Transfected cells were grown for several days before harvesting (by scraping cells in a sucrose synthase buffer). Harvested cells were frozen on dry ice and freeze-thawed twice before pelleting cell debris by centrifugation. The resulting supernatant (cell lysate) was deionized on G25 spin columns and then used in a sucrose cleavage assay as described by Sebkova et al. (Plant Physiol. 108:75-83, 1995). In these assays, the cell lysates were tested for their ability to cleave sucrose in the presence of UDP to produce fructose and uridine 5′-diphosphoglucose. Following a 30 min incubation at 30° C., the enzyme activity was stopped by boiling the tubes for 1 min. Both NAD and UDP-glucose dehydrogenase were added and the change in OD at 340 nM (production of NADPH) was measured. As shown in FIG. 7, significantly higher levels of sucrose cleavage were observed in cells transfected with FaSUS1 construct than in non-transfected control cells.

### EXAMPLE 7

### Use of Acid Invertases to Cleave Sucrose

[0124] A number of acid (vacuolar and cell wall) invertase genes from L. perenne and F. arundinacea (SEQ ID NOS: 17, 19, 21, 23 and 135-141) were identified that share amino acid sequence identity with acid invertases from other plant species (Unger et al., Plant Physiol. 104:1351-1357, 1994; Goetz and Roitsch, J. Plant Physiol. 157:581-585, 2000). These sequences were analysed by SignalP and homology to identify signal regions and propeptide sequences, and primers were designed to amplify the DNA sequence encoding the mature protein (Table 4).

TABLE 4

| SEQ | SEQ | | | | |
|---|---|---|---|---|---|
| ID NO | ID NO | | Primers SEQ | DNA bp | Protein |
| DNA | PROT | Gene | ID NO | amplified | codons |
| 17 | 79 | LpCWINV1 | 201 | 137-1803 | 38-583 |
| | | | 202 | | |
| 19 | 81 | FaCWINV4 | 203 | 134-1912 | 26-597 |
| | | | 204 | | |
| 25 | 87 | LpSINV1 | 205 | 387-2124 | 104-668 |
| | | | 206 | | |

[0125] The PCR fragments were cloned into pPICZαA vectors for expression in methylotrophic yeast Pichia pastoris (EasySelect TM Pichia Expression Kit, Invitrogen, Carlsbad, Calif.). The sequences were cloned in frame with the α-mating factor for secretion of the recombinant invertase protein into liquid media, following similar methods described for the expression of barley 6-SFT and fescue 1-SST in P. pastoris (Hochstrasser et al., FEBS Letters 440:356-360, 1998; Lüscher et al., Plant Physiol., 124:1217-1227, 2000). The media was concentrated 10 fold by Vivaspin 30 kDa spin column (VivaScience, Hannover, Germany) to concentrate recombinant protein and used directly to assay invertase activity. Recombinant protein was assayed with 100 mM sucrose in 500μl phosphate buffer pH 5.0, at 30° C. for 1 hour. Release of glucose by invertase activity was measured using a glucose HK assay kit (Sigma, St Louis, Mich.). FIG. 8 shows the glucose released by invertase activity in terms of glucose concentration in the assay mix. As shown in FIG. 8, invertase activity was observed for the vacuolar invertase (LpSINV1; SEQ NO: 25) and the two cell wall invertases (LpCWINV1 and FaCWINV4; SEQ NO: 17 and 19, respectively) but not for an empty vector (pPICZalphaA) control.

### EXAMPLE 8

### Use of Tannin Genes to Modify Tannin Biosynthesis

[0126] Certain Arabidopsis mutants of the transparent testa (tt) phenotype do not make the anthocyanin pigment cyanidin and therefore have no seed coat color. The genes responsible for many of these mutants have now been identified as shown in Table 5.

TABLE 5

| Enzyme | Abbreviation | Locus | Chromosome |
|---|---|---|---|
| Dihydroflavanol-4-reductase | DFR | tt3 | 5 |
| Chalcone synthase | CHS | tt4 | 5 |
| Chalcone isomerase | CHI | tt5 | 3 |
| Flavanone 3-β-hydroxylase | F3βH | tt6 | 3 |

[0127] Over-expression of the maize genes for CHS, CHI and DFR has been shown to complement the Arabidopsis tt4, tt5 and tt3 mutants, respectively, thereby restoring cyanidin synthesis and seed coat color (Dong et al., Plant Physiol. 127:46-57, 2001). Complementation of these Arabidopsis mutants may therefore be employed to demonstrate the function of the inventive polynucleotides encoding enzymes involved in the tannin biosynthetic pathway.

[0128] Sense constructs containing a polynucleotide including the coding region of tannin genes isolated from L. perenne or F. arundinacea LpCHS, LpCHI, LpFβH, LpDFR1, FaCHI and FaF3βH (SEQ ID NO: 157, 55, 161, 159, 56 and 62, respectively) under the control of the CaMV 35S promoter were inserted into a binary vector and used to transform Agrobacterium tumefaciens LBA4404 using published methods (see, An G, Ebert P R, Mitra A, Ha S B, “Binary Vectors,” in Gelvin S B, Schilperoort R A, eds., Plant Molecular Biology Manual, Kluwer Academic Publishers: Dordrecht, 1988). The presence and integrity of the binary vector in A. tumefaciens was verified by polymerase chain reaction (PCR) using the primer pairs described in Table 6.

TABLE 6

| | SEQ ID | Transparent | Forward Primer | Reverse Primer |
|---|---|---|---|---|
| Gene | NO: | testa line | SEQ ID NO: | SEQ ID NO: |
| LpCHS | 157 | tt4 | 211 | 212 |
| LpCHI | 55 | tt5 | 213 | 214 |
| LpF3βH | 161 | tt6 | 217 | 218 |
| LpDFR1 | 159 | tt3 | 215 | 216 |
| FaCHI | 56 | tt5 | 213 | 214 |
| FaF3βH | 62 | tt6 | 217 | 218 |

[0129] The A. tumefaciens containing the sense gene constructs are used to transform Arabidopsis by floral dipping (Clough and Bent, Plant J. 16:735-743, 1998). Several independent transformed plant lines were established for the sense construct for each of the tannin genes. Specifically, LpDFR1 constructs were transformed into Arabidopsis tt3 mutants, LpCHS constructs were transformed into Arabidopsis tt4 mutants, LpCHI and FaCHI constructs were transformed into Arabidopsis tt5 mutants, and LpF3βH and FaF3βH constructs were transformed into Arabidopsis tt6 mutants. Several independent transformed plant lines were established for the construct for each of the tannin genes. Transformed plants containing the appropriate tannin gene construct were verified using PCR.

[0130] The presence of cyanidin in the FaCHI transformed plants is demonstrated by a phenotypic change in plant seedling color and by analyzing cyanidin extracts made from transgenic plants grown under stressed conditions (Dong et al., Plant Physiol. 127:46-57, 2001). Briefly, cyanidins are extracted from plant tissue with an acid/alcohol solution (HCl/methanol) and water. Chlorophyll is removed by freezing the extracts followed by centrifugation at 4° C. at 20,000 g for 20 min. Any remaining chlorophyll is removed through a chloroform extraction. The absorbance at 530 nm is measured for each of the cyanidin extracts. Non-transgenic wild type and control Arabidopsis plants are used as controls.

[0131] SEQ ID NOS: 1-218 are set out in the attached Sequence Listing. The codes for nucleotide sequences used in the attached Sequence Listing, including the symbol “n,” conform to WIPO Standard ST.25 (1998), Appendix 2, Table 1.

[0132] All references cited herein, including patent references and non-patent publications, are hereby incorporated by reference in their entireties.

[0133] While in the foregoing specification this invention has been described in relation to certain preferred embodiments, and many details have been set forth for purposes of illustration, it will be apparent to those skilled in the art that the invention is susceptible to additional embodiments and that certain of the details described herein may be varied considerably without departing from the basic principles of the invention.

The application's sequence listing, which the Patent Office published only in electronic form, follows.

SEQUENCE LISTING (218 sequences)

SEQ ID NO: 1 - DNA, 2106 bp, Lolium perenne
gacttagccttcctcggaaccatcgaccgggccgccgccgacgcgacgcgacgcgatggagtccagcgccgtcgtccccggcaccacggcgccgctgcttccttatgcgtacgcgccgctgccgtcgtcctccgacgacgcccgtgaaaacagaagtagcggcggcgtgaggtggcgcgcgtgcgccgtcgttctggcggactcggcgttggcggtggtggtcgtggtcgggctcctcgcgggcggcagggtggatcgggtcccggccggcgcagacgtggcgtcggccacggtgccggccgtgccgatggagttcccgaggagccggggcaaggacttgggcgtgtcggagaagtcctccggtgcctactccgccgacggcgggttcccgtggagcaacgccatgctgcagtggcagcgcaccgggttccatttccagccggagcagcactacatgaacgatcccaacggccccgtgtactacggcggatggtaccacctcttctaccagcacaaccccaagggcgacagctggggcaacatcgcctgggcccacgccgtgtccaaggacatggtcaactggcgccacctcccgctcgccatggttcccgaccagtggtacgacagcaacggcgtcctcaccggctccatcaccgtgctccccgacggccaggtcatcctgctctacaccggcaacaccgacaccctagcccaggtccagtgcctcgccacgcccgccgacccgtccgacccgctcctccgcgaatggatcaagcaccccgccaaccccatcctcttcccgccgcccgggatcgggctcaaggacttccgcgacccgctcaccgcctggttcgaccactccgaccacacctggcgcaccgtcatcgggtccaaggacgacgacggccacgccggcatcatcctcagctacaagaccaaggacttcgtcaactacgagctcatgcccgggaacatgcaccgcgggcccgacggcaccggcatgtacgagtgcatcgacctctaccccgtcggcggcaactcgtcggagatgctcggcggcgacgactcgcccgacgtgctcttcgtgctcaaggagagcagcgatgacgaacgtcacgactactatgcgctcggaaggttcgacgccgtcgccaacgtttggacgcccatcgaccgggacctggaccttgggatcgggctcagatacgactggggaaagtactacgcctccaagtccttctacgaccagaagaagaaccgccgcatcgtatgggcatacatcggcgagaccgactccgagcaggccgacatcaccaagggatgggccaatctcatgacgattccaagaacggtggagcttgacaggaagacccgcacaaacctcatccaatggccagtggaggaggtcgacaccctccgcaggaactccacggacctcggtcgcatcaccgtcaacgccggctccgtcattcgcctccccctccaccagggcgctcaactcgacatcgaggcctccttccaactcaactcttccgacgtggatgctatcaacgaggccgacgtcggctacaactgcagcaccagcggtgccgccgtacggggggcgctcggcccctttggcctcctcgtccttgccaatggccgcaccgaacagacggctgtgtacttctacgtgtccaagggcgtcgacggcggcctccagacccacttttgccacgacgagtcacggtcaacacgggcaaaggatgtcgtgaataggatgattggcagcatcgtgccggtgcttgacggtgagaccttttcggtgagggtgctagtggaccactccatcgtgcagagcttcgcgatgggcgggaggatcacggcgacgtcgcgggcgtacccgacggagaccatctacgcggccgcaggggtctacctcttcaacaacgccacgggcgccaccgtcaccgccgagaggctcgtcgtgcacgagatggcctcagctgacaaccatatcttcacgaacgacgacttgtagatgaaaccaagtttagctcgtgttgcattcttgttaacggccggtgattgcctatctacacattcatttggcgttcaaaaaaaaaa

SEQ ID NO: 2 - DNA, 2293 bp, Festuca arundinacea
gcatagtccactcagccttcctcggaaccatcgaccgggccgccgccgacgcgacgcgacgcgatggagtccagcgccgtcgtccccggcaccacggcgcggctgcttccttatgcgtacgcgccgctgccgtcgtccgccgacgacgcccgtgaaaaccagggtagcgacggcgtgaggtggcgcgcgtgcgccgccgtgttggccgcctcggcgttggcggtgctggtcgtggtcgggctcctcgcggggggcagggtggatcggccgggtccggccgcggtgccggcggtgccgacggagatcccgaggagccggggcaaggacttcggcgtgtcggagaagtcgtccggggcctactccgccgacggcgggttcccgtggagcaacgccatgctgcagtggcagcgcaccgggttccacttccagccggagcagcactacatgaacgatcccaacggccccgtctactacggcggatggtaccacctcttctaccagtacaaccccaagggcgacagctggggcaacatcgcgtgggcccacgccgtgtccaaggacatggtcaactggcgccacctcccgctcgccatggtgcccgaccagtggtatgacagcaacggcgtcctcaccggctccatcaccgtgctccccgacggccgggtcatcctgctctacaccggcaataccgacaccctggcccaggtccagtgcctcgccgagcccgccgacccgtccgacccactcctccgcgaatggatcaagcacccggccaaccccatcctcttcccgccgcccgggatcggcctcaaggacttccgcgaccccctcaccgactggttcgatcactccgacgacacctggcgcactgtcattgggtccaaggacgacgacggccacgccggcatcatcctcagctacaagacaaaggacttcgtcaactacgagctcatgccggggaacatgcaccgaggccccgacggcaccggcatgtacgagtgcatcgacctctacccagtgggcggcaactcgtcggagatgctcggcggcgacgactcgcccgacgtgctctttgtgctcaaggagagcagcgatgacgagcgtcacgactactacgcgctcgggaggttcgacgccgccgccaacatttggacacccatcgaccaggagctggacctcgggatcgggctcaggtacgactggggaaagtactacgcctcaaagtccttctacgaccagcggaagaaccgccgcgtcgtatgggcctacatcggcgagaccgactccgagcaggccgacatcaccaagggatgggccaatctcatgacgatcccaagaacggtggagcttgacaagaagacccggacaaacctcatccaatggccagtggaggaggtcgacaccctccgcaggaactccacggacctcggtcgcatcaccgtcaacgccggctccgtcattcgccttcccctccaccaaggcgctcaactcgacatcgaggcctccttccagctcaactcttccgacgtggatgctctcaacgaggctgacgtcggctacaactgcagcaccagcggtgccgccgtgcgtggggcgctcggcccctttggcctcctcgtccttgccaacggccgcaccgaacagacggctgtgtacttctacgtgtccaagggcgttgatggcgccctccagacccacttctgccacgacgagtcacggtcgacgcgggcaaaggatgttgtgaataggatgattggcagcatcgtgccggtgcttgacggtgagaccttctcggtgagggttctattggaccactccatcgtgcagagcttcgcgatgggtgggaggatcacagcgacgtcgcgggcgtacccgactgaggctatctacgcagcggcgggggtctacgtcttcaacaacgccacgggtgccaccgtcactgccgagaggctcgtcgtgtacgagatggcctcggctgacaaccatatcttcaggaacgacgacttgtagatgaaaccaagtcgagctcttgttgcattcatggtcatcggtgatcgcccctgtctacacatccatttggcattcggtcggcgggttcctcgatcttgtcatggatggggatcaagatggagtacaatagttttcggtttgtttttttgtatcggtgagatgaatggaaattagatgactgtcctgcccccaagtgcaactatctgcaggagcacttctgcagtgactatgatgacggtgtcatgtatcaactgtaccagatctttttaattgaaaaaaaaaa

SEQ ID NO: 3 - DNA, 2072 bp, Festuca arundinacea
gcccatccaccggagtatactaggaaattcctgcaactcgacctcgcgttgggaattccggcaatggagtcccgggcctttcccaacgcggcgtacgcgccacttctgccacccaccgctgacgacgccaccctgggcaagcaggaccgccccggcgtggggtggcgcgggttcttaaccgtgctggccgcgtctggcgtggtggtgctcctcgtcgctgccactatgctcgcgggatccaggatgggtcaggcaggcgacaccgacgaggacggggccggagggttcccgtggagcaacgagatgctgcagtggcagcgcgccgggttccattaccagcccgaggggcacttcatgagcgatccagacggtccggtatactaccgtggatattaccacctcttctttcagtacaaccgaaggggcgtcgcgtgggatgactacatagagtggggccacgtggtgtcccaggacctggtacactggcgccctctcccactggccctgcggcctgaccattggtacgacaagaagggcgtcttgtcgggtaccatcacggtgctccacaatggcacgctcgtcctgctctacacgggggtcacagaagaccctatggccgagtctcagtgcatcgccgtcccgaccgaccccaacgaccccctccttcgccattggaccaagcaccccgccaaccctgttctcgctcacccacagggggtccagggcatggacttccgagaccccaccagtgcatggtttgacaagtccgacgccacgtggcgcattctcatcggttccaaggatgacgacaatggaagccacgctggcatcgccttcatcttcaagaccaaggacttccttagcttcgagcgcgtcccaggtatcgtgcatcgtgtcgagggtaccggtatgtgggagtgcatcgacttttaccccgtcggaggtggccacaactcttcgtcggaggagctgtacgtgataaaggcgagcatggacgacgaacgacacgactactactcattggggagatatgacgcggcagccaacacatggacgccattggacgccgagctagacttggggattgggctgagatacgactggggcaagctctacgctgccacgtcgttctacgatccgctgaagcagcggcgaattatgttggggtatgtaggcgagaccgactctgcacgagccgacgttgccaagggatgggcctcacttcagtcgattccgaggacagtgacactagacgagaagaccaggacgaacctcctcctatggccggtggaggaggtggaggccctccgctacaactccaccgacctcagtggcatcactgttgacaacggctcagtcttccacctccccctccaccaagccactcacctggacatcgaggcttccttccgcctcgacgcttctgacgttgccgccatcaacgaggccgatgtcggctataactgcagcagcagcggtggcgcggccgcacgtggcgctatcggccccttcggcctcctcgtccatgccgccggagacctccgtggcgagcagacggcggtgtacttctacgtgtccagggccctcgacggtaccctccggactagcttctgcaacgacgagacgcggtcgtcacgggccagggacgtgacgaagcgggtggtgggcagcacggtgccggtgctccacggtgaggcgttgtcgatgagggtgctcgtggaccactccatcgtgcagagcttcgccatgggtgggagagtcacggcgacctcgcgggtgtacccaacggaggccatctacgccagggcaggggtgtacctgttcaacaacgctaccggcgccagcgtgactgcggagaggctcatcgtgcacgagatggcctcggcggtatacgacgagaccctgatcatggttgaggactcgtagctgctcacatgagctatatatcagaccggtaacgttgggtcacttgcatttccaagcgttgaataatttacttagcttagcaagcaacaggtccgaggttccaagtaaggggtgggatttttttcccggtttccaaaaaaaaaaaa

SEQ ID NO: 4 - DNA, 2207 bp, Lolium perenne
gcacccatccaccggaatatatatactagtcaggaaattcctgcaactcgacctcgagttgggaattccggcaatggagtcccgggcctttcccagcgcggcgtacgcgccacttctgccatccgccgcagacgacgtcgccctggccaagcaggaccgccccggcgtggggtggcgcgggttcttaaccgtgctggccgcctgcggcgtggtggtgctcctcgtcggtgccactttgctcgcgggatccaggatgggtcaggcaggcgacggcgaaggcaacaccgacgaggatggggccggagggttcccgtggagcaacgagatgctgcagtggcagcgcgccgggttccattaccagccggaggggcacttcatgagcgatccaaacggtccagtatactaccgcggatattaccacctcttctttcagtacaaccgaaggggcgtcgcgtgggatgactacatagagtggggccacgtggtgtcccaggacctggtacactggcgccctctcccactggccatgcggcctgaccattggtacgacaagaagggcgtcttgtcgggtaccatcacggtgctccacaatggcacgctcgtcctgctctacacgggggtcacagaagaccctatggccgagtcccagtgcatcgccgtcccgaccgaccccaacgaccccctccttcgccattggaccaagcaccccgccaaccccgtccttgctcacccacagggggtccagggcatggacttccgagaccccaccagcgcgtggtgggacaagtccgatgccacgtggcgcattctcatcggttccaaggacgacgacaacggcagccacgctggcatcgccttcatcttcaagactaaggacttccttagcttcgagcgtgtcccaggtatcgtgcatcgtgtcgagggcaccggcatgtgggagtgcatcgacttttaccccgtcggaggtggccacaactcttcgtcggaggagttgtacgtgataaaggcgagcatggacgacgaacgccacgactactactcattggggaggtacgacgcggcagcgaacacatggacgccattggacgccgagctagacttggggattgggctgagatacgactggggcaagctctacgcttccacgtcgttctacgatccggtgaagcagcggcgcattatgttggggtatgtaggcgaggtcgactctgcgcgagccgatgttgccaagggatgggcctcgcttcagtcgattccgaggacagtggcgctagacgagaagacccgaacgaacctcctcctatggccggtggaggaggtggaggccctccgctacaactccaccgacctcagcggcatcaccattgacaacggctccgtcttccacctcccactccaccagaccactcagctggacatcgaggcttccttccgcctcgacgcttctgatgttgccgccatcaacgaggccgacgtcggctacaactgcagcagcagcggcggcgcggcggcacgtggcgctctcggccccttcggcctcctcgtccatgccgccggagacctccgtggcgagcagacggcggtctacttctacgtgtccagggccctcgacggtaccctccggaccagcttctgcaacgacgagacgcggtcgtcgcgggccagggacgtgacgaagcgggtggtgggcagcacggtgccggtgctcgacggcgaggcgttgtcgatgagagtgctcgtggaccactccatcgtgcagagcttcgcgatgggcgggaggaccacggcgacctcgcgcgtgtacccgacggaggccatctacgccagggctggggtgtacctgttcaacaacgccaccggcgccggcgtgacggcggagaggctcatcgtgcacgagatggcctcggcggtatacgacgagaccctcatggttgaggactcatagctgctcacccgtaacgttgggtcacttgcatttccaagcgttgaattaataatttacttgttgtagcagcaagcaacggtccaaggttccaagtaaggtgggatattataccaaactccgcaagtcccgcaaggttgtgtaggtgtaagttaatgttggcgcacctgcgcgtgtgcatgtaagttgttgtatttgttgttcttttaaaaaagaaagataccaatctaccatcctatgtaagcataaaaaaaaaaaaaaaaaa

SEQ ID NO: 5 - DNA, 2163 bp, Festuca arundinacea
gaattcctgcaactcgacctcgagttgggaattccggcaatggagtcccgggcctttcccagcgcggcgtacgcgccacttctgccacccaccgctgacgacgccaccctgggcaagcaggaccgccccggcgtggggtggcgcgggttcttaaccgtgctggccgcgtctggcgtggtggtgctcctcgtcgctgcctctttgctcgcggggtccaggatgggtcaggcaggcgacggcgaaggcaacaccgacgaggacggggccggagggttcccgtggagcaacgagatgctgcagtggcagcgcgccgggttccattaccagcccgaggggcacttcatgagcgatccagacggtccggtatactaccgtggatattaccacctcttctttcagtacaaccgaaggggcgtcgcgtgggatgactacatagagtggggccacgtggtgtcccaggacctggtacactggcgccctctcccagtggccatgcggcctgaccattggtacgacaagaagggcgtcttgtcgggtaccatcacggtgctccacaatggcacgctcgtcctgctctacacgggggtcacagaagaccctatggccgagtcccagtgcatcgccgtcccgaccgaccccaacaaccccctccttcgccattggaccaagcaccctgccaaccctgttctcgcacacccacagggggtccagggcatggacttccgagaccccaccagcgcatggtttgacaagtccgacgcgacgtggcgcattctcatcggttccaaggacgacgacaatggaagccacgctggcatcgccttcatcttcaagaccaaggacttccttagcttcgagcgcgtcccgggtatcgtgcatcgtgtcgagggtaccggtatgtgggagtgcatcgacttttaccccgtcggaggtggccacaactcttcgtcggaggagctgtacgtgataaaggcgagcatggacgacgaacgacacgactactactcattggggagatatgacgcggcagccaacacatggacgccattggacgccgagctagacttggggattgggctgagatacgactggggcaagctctacgctgccacgtcgttctacgatccgctgaagcagcggcgaattatgttggggtatgtaggcgagaccgactctgcgcgagccgacgttgccaagggatgggcctcacttcagtcgattccgaggacagtgacactagacgagaagaccaggacgaacctcctcctatggccggtggaggaggtcgaggccctccgctacaactccaccgacctcagtggcatcactattgacaacggctcagtcttccacctccccctccaccaagccactcagctcgacatcgaggcttccttccgcctcgacgcttctgacgttgccgccatcaacgaggccgacgtcggctacaactgcagcagcagcggtggcgcggccgcacgtggcgctatcggccccttcggcctcctcgtccatgccgccggagacctccgtggcgagcagacggcggtgtacttctacgtgtccagggccctcgacggtaccctccggaccagcttctgcaacgacgagacgcggtcgtcacgggccagggacgtgacgaagcgggtggtgggcagcacggtgccggtgctcgacggtgaggcgttgtcgatgagggtgctcgtggaccactccatcgtgcagagcttcgccatgggtgggagagtcacggcgacctcgcgggtgtacccgacggaggccatctacgccagggcaggggtgtacctgttcaacaatgccaccggcgccagcgtgactgccgagaggctcatcgtgcacgagatggcctcggcggtgtacgacgagaccctcatggttcaggactcatagtttctcacatgagctatcagactggtaacgttgggtcacttgcatttccaagggttaaataatttacttagcgtagcaactggtccgaggttccaagtaaggtgggatattcttccaaactccgcgagtcccgtcaggttgtgttggtgtgagtgtgatgttggcgcacctgcgcgtgtgcatgtaagttgttgtatttgttgtttctatacctaataataaaggaaaaaggatttctccctaaaaaaaaaa

SEQ ID NO: 6 - DNA, 2200 bp, Lolium perenne
agccgaggcacccatccaccggagtatactagctaggaaattcctgtgcaactcgacctcgagtttggaattccggcaatggagtcccgggactttcccagcgcggcgtacgcgccacttctgccatctgccgcagacgacgtcgccctggccaagcaggaccgccccggcgtggggtggcgcggcttcttaaccgtgctggccgcctgcggcgtggtggtgctcctcgtcgctgcctctttgctcgcggggtccaggatgggtcaggcaggcgacaccgacgaggacggggccggagggttcccgtggagcaacgagatgctgcagtggcagcgcgccgggttccattaccagccggaggggcacttcatgagcgatccagacggtccggtatactaccgtggatattaccacctcttctttcagtacaaccgaagaggggtcgcgtgggatgactacatagagtggggccacgtggtgtcccaggacctggtacactggcgccctctcccactggccatgcggcctgaccattggtacgacaagaagggcgtcttgtcgggtaccatcacggtgctccacaatggcacgctcgtccttctctacacgggggtcacagaagaccctatggccgagtcccagtgcatcgccgtcccgaccgaccccaacgacccccttcttcgccattggaccaagcaccccgccaaccccgttctcgctcacccacagggggtccagggcatggacttccgagaccccaccagcgcgtggtgggacaagtccgactccacgtggcgcattctcatcggttccaaggacgacgacaacggcagccacgctggcatcgccttcatcttcaagaccaaggacttccttatcttcgagcgtgtcccaggtatcgtgcatcgtgtcgagggtaccggcatgtgggagtgcatcgacttttaccccgttggaggtggccacaactcttcgtcggaggagttgtacgtgataaaggcgagcatggacgacgaacgacacgactactactcattggggaggtatgacgcggcagcgaacacatggacgccattggacgccgagctagacttggggattgggctgaggtacgactggggcaagctctacgcttccacgtcgttctacgatccactgaagcagcggcgaattatgttggggtatgtaggcgatgtcgactctgcgcgagccgacgttgccaagggatgggcctcacttcagtcgattccgaggacagtggcactagacgagaagacccggacgaacctcctcctatggccggtggaggaggtggaggccctccgctacaactccaccgacctcagcggcatcactgttgagaacggctccatcttccacctccctctccaccaagccactcagctggacatcgaggcttccttccgcctcgatgcttctgatgttgctgccatcaacgaggccgacgtcggctacaactgcagcagcagcggtggcgcggccgctcgtggcgctctcgggcccttcggcctcctcgtccatgccgccggagacctccgtggcgagcagacggcggtgtacttctacgtgtccagggccctcgacggtagcctccggaccagcttctgcaacgacgagacgcggtcgtcacgggcccgggacgtggcgaagcgggtggtgggcagcacggtgccggtgctcgacggcgaggtgttagcgatgagggtgctcgtggaccactcgatcgtgcagagcttcgcgatgggtggaagggtcacggcgacgtcgcgggtgtacccaacggaggctatctacgccagggcaggggtgtacctgttcaacaacgccaccggcgccagcgtgacggcggagaggctcatcgtgcacgagatggcctcggcggtatacgacgagaccgtcatggttaaggactcatagctgctcacacatgagctatcagaccggtaacgttgggtcactagcattttcaagcgttaggataatttacttggcgtagcaagccccgggtccgaggttccaaaagtaaggtgggatattcttccaaactccgcgagtcccgcaaggttgtctaggtgtaagtgtaatgtcgtttgcgcacctgcgcgtgagcttgtaatttgctggatttgttgtttatttacagaaaaaaaaggatactatactatgtaagtatctacat

SEQ ID NO: 7 - DNA, 1756 bp, Festuca arundinacea
cccatctctcccgaaacaaccgctcgccacccgtctccctcccctgccctcgcctccccattccccttcctcttcttcccttggcgacggcctcgtcgatcggacccaatctccaccaaacgcgcctccggatctcgcgcgccgcctcgaaggggatcctcccgtggccgccgtcctcctccgccgctcggctggactgtcgtggagcggggatcgacccgggctctctgtcgctggttgctaaaatggataagctcaatggttctgcgcgtcttatgattgtttcagacctcgatcatacaatggttgatcatcatgacgaagagaacttgtcgttgcttaggtttggggccctttgggagtctgcttactgtcaggattctctacttgtcttctcgaccggaagatcacccactctctataaggaattgaggaaagagaagcctatgctaactccagacatcactattatgtcggtgggcagtgagataacttatggtgaggccatggttcctgatgatggctgggaggaatatctgaacaataagtgggacagaaatattgttcttgaggagaccgctaagtattctgagctgaagcttcagccagagacagaacagcgtccacataaggtcagcttcttggttgacaagaagagtgctcaggaagtgataaagtctctctctgagaagtttgagaaacgtggggtagatgcaaaaataatctatagtggtggccaagaccttgacatattagctcaaggggctggaaagggtcaggcgcttgcatatttactcaagaagttcgcctcatgcgggaaaacacccaacaatactcttgtttgtggtgactctggcaatgatgcagaattattcagcatccctggtgtgcacggtgtcatggttagcaatgcccaagaggaactactccagtggcatgcagaaaatgcgaaggataaccctaaggtaattcatgcaactgagaggtgtgctgctggtattattcaagctattgggcacttcaagctaggacctaatatttctccaagagacattgagtttccttacgtcaaggaggactctttcaagcctacagcggctgttgtgaagttctatgttctctgcgagaagtggcgtagggctgacgttccaaaggctgattcagttatagagtacttcaaaaacatcacggatgcaagtggagttattattcatccctctggcctcgaactttcgatccattcttccatcgatgcgttggcttcatgttatggtgacaaacaagggaaaaagtaccgatcatgggtggacagactagttatctcacagactgcttctgacagttggcttgtgagatttgacttgtgggaggcagaaggtgatgcatgggtgtgctgtttgacaactcttgcgctgaatgtaaagcctgaaacccctgggggtttcgtggtaacacacatccacaagacatggctcaaagaatattccggggatgagcaggcgtccaaactctagactggatctctaccgtcagcgcacgggaaggaaattttcttgagaatcaaataagaagcgcacagaaaacacgagaatttcttttccttgttcataatgttaataagtgctcccagacactacatatatcatactggatgaagtatacggaggtcttgatgcttggcctaatgcttacttgatgtgtaagataaaaatattatatctcgttactggcatgagaagctgaagtaaaaaaaaaa

SEQ ID NO: 8 - DNA, 1778 bp, Lolium perenne
ggaaccacaaaggcgctcgcccatctctcctccttcccgaaacaaccgctcgccacccgtctcccctcccctgccctcgcctccccattcccctccctcttcttcccttggccacggcctcctcgatcggacccaatctccaccacacgcgcctccggatctcgcgcgccgcctccaaggggatcctcccgtcctcccccgccgctcggctggaccgtcgtcgagcggggatcgacccgggctctccgtcgctggttgctaaaatggataagctcaatggttctgcgcgtctcatgattgtttcagacctcgaccatacaatggttgatcaccatgacgaagagaacttgtctctgcttaggtttggggccctttgggagtctacttactgccaggattctcttcttgtcttctcgaccggaagatcgcccactctctataaggaattgaggaaagagaagcctatgctgactccagacatcactattatgtcggtgggcagtgagattacttatggcgaggccatggttcctgatgatggctgggaggaatatctcaacaataagtgggacaagagtattgttcttgaggagaccgctaagttttctgagctgaagcttcaggcagagacagaacagcgtccacataaggtcagcttcttggttgacaagaagactgctcaggaagtgatcaagtctctctctgaaaagtttgagaaacgtggggtagatgcgaaaataatctatagtggtggccaagaccttgacatattagctcaaggggctggaaagggtcaggcgcttgcatatttactcaagaagttcgcctcatgcgggaaaacacccaacaatactcttgtttgcggtgactctggcaatgatgcagaattattcagcatccctggtgtgcacggtgtcatggttagcaatgcccaagaggaactactccagtggcgtgcagaaaatgcgaaggataaccctaaggtaattcatgcaactgagaggtgtgctgctggtattattcaagctatcgggcacttcaagctaggacctaatgtttctccaagagacgttgagtttccttacgtcaaggaggactctttcaagcctacagcggctgttgtgaagttctatgttctctgcgagaagtggcgtagggctgacgttccaaagactgattcagttatagagtacttcaaaaacatcacggatgcaagtggagttattattcatccctctggccttgaactttcgatccattcttccatcgatgcgttggcttcatgttatggtgacaaacaagggaaaaagtaccgatcatgggtagacagactagttatctcacagactgcttctgacagttggcttgtgagatttgacttgtgggaggcagaaggtgataagtgggtgtgctgtttgacaactcttgcgctgaatgtaaagcctgaaacccctgggggtttcgtggtaacacacatccacaagacatggctcaaagaatattccggggatgagcaggcgtccaagctctagactggatctccaccggcagcgcacgggaaggaaattttcttgagaatcaaataagaagcgcacagaaaacatgagaatttctttttcttgttcataatgttaataagtgctcccagacactacatatatcatactggatgaagtctacggaggtcttcggctaatgcttacttgatgtgtaagataaaaatattatatcttgttactgcatgagaagctgaagtaaatgatcccaaaaaaaaaaaa

SEQ ID NO: 9 - DNA, 3629 bp, Festuca arundinacea
agtagcctgcctgctcgccggcgagagatagctagggagggagggtaactagcgcaggaggagcctgctcgcctgccgtcgagatggcggcggggaacgagtggatcaacgggtacctggaggcgatcctggacgccgggtcgaagctgcggccgcagggcgtgcagctgccgccgctggagacggcgccggcgctcgcggccgaggagtccggcgccgcctacaaccccaccaggtacttcgtggaggaggtggtcaggagcttcgacgagcaggccctccacaagacatggacaaaggtggttgcgatgcggaacagccaggagcgcagcaaccggctggagaacctgtgctggaggatctggaacgtctccaggcagaagaagcaggtggagtgggattacacgaaagaggtggcccggcggaagcttgagcaggagctgggcagccgggaggccgccgaggacctctccgagctctccgagggcgagaaggataccaccaccgccaagcctgacgccgcaaccgctcaaccgtccaccgacgatggcgagcaccagcagccacaaccacgcacccggctcgcgaggatcaactccgaggtgcggctcgtctccgacgacgaggaggagcagaccaagaagaggaacctctacatcgtcctcatcagcatccatgggctggtgcgcggggagaacatggagctcggccgagactccgacaccggaggccaggtgaagtacgtggtggagctggcccgtgcgctggcggccacggcgggggtgcaccgcgtggacctgctgacgcggcagatctcctgccccgacgtggactggacctacggcgagccggtggagatgctggagcgcctgtcgtcggcggacgcggacgaggacgacggcgagcagtctggcggcggggcgtacatcgtgcggctgccgtgcgggcccagggaccagtacatccccaaggaggagctgtggccgcacatcccggagttcgtggaccgcgcgctctcgcacgtcaccgaggtggcgcgcgcgctaggcgaccagctccagcctcctcccactccggccgcgggcgacggcgcagccctagtggcagcgcccatatggccgtacgtgatccacggccactacgcggacgcggcggaggtggcggcgaacctggcgagcgcgctgaacgtgcccatggtcatgacgggccactcgctggggcgcaacaagctggagcagctgctcaagctgggccgcatgccgggccccgagatccagggcacctacaagatcgcgcgccggatcgaggccgaggagaccggcctcgacaccgcggagatggtggtcaccagcaccaagcaggagatcgaggagcagtggggcctctacgacggcttcgacctcatggtggagcgcaagctcagggtaaggcagcgccgcggcgtcagcagcctcggcaggtacatgccgcgcatggcggtcatcccgcccggcatggacttcagcttcgtcgagacacaggacacggctgagggggatggcgccgacctgcagatgctcattgcccccgacaaggccaagaaggctctgcctcccatttggtcggacgtgctgaggttcttcacgaacccgcacaagccgatgatcctggcgctgtcgcggccggacccgaagaagaacgtcactacgctgctcaaggcctacggcgagagccgccagctccgggagctcgcgaacctgactttgatactggggaacagggatgacatcgaggacatggccggcggcggcggcgcggtgctcacggcggtgctcaagctcatcgaccgatacgacctctacggccaggtggcctatccaaagcaccacaagcagacggacgtgcctcacatctaccgcctcgctgcaaagaccaagggagtattcaccaacccagctcttgtagagccgttcggcctcacaatcatcgaggctgctgcttacggtttgccggtggtcgcaaccaagaacggagggccggtggacatcctcaaggcgctcaacaacgggctgctggtggacccgcactcggcggaggcgatcaccggcgccctgctgagcctgctggccgagaagtcgcggtgggtggagtgccgccgcaacggcctccgcaacatccaccgcttctcgtggccgcaccactgccgcctctacctctcccacgtctccacctactgcgaccagccctcgccgcaccagcctctccgcgtgcccctcggcctgggctcctcgaccagcttcggcgcagacgactcgctctcggactcgctccgcggcctctcgctccagatatccgtggacgcctccagcgacctcaacgccgcggactccgcggccgccatcatggacgcgctccgccggcgcccggcctccgagaagccggcgagctccggtgccagggcgctcggcttcgcgcccggccggcgggagagcctcctggtggtcgccgtcgactgctacggcgacgacggcaagccggacgtcaagcagctaaagaaggccatcgacgcggcggtgtcggttggtgaatgcgcgggagctaagcaggggtacgtgctgtcgaccggcatgaccatccccgaggccgcggaggcgatcaaggcgtgcggcgccgacgttgccagcttcgacgcgctgatatgcagcagcggggccgagctatgctacccgtggaaggagctcgcggccgacgaggagtactccgggcacgtcgcgttccggtggcccggtgaccacgtgaaatccgccgtgcccaggctcgggagcttggaggagatcgccctcgcaatcgatcgccccgcctgctccgtgcactgccacgcctacgccgccacggacgcatccaaggtgaagaaggtggattcgatcaggaagtcgctgcggatgcgcgggttccggtgcaacctcgtctacacgcgcgcgtgcacgcgcctcaacgtcatccccctctccgcttcccggccgcgcgctctcaggtacctgtcgatacagtgggggatcgatctctccaaggtggcggtgctcgtcggcgagaccggcgacaccgaccgcgagaggctcctcccgggagttcacaagacgctcatcctgccgggaatggtcgcccgcggcagcgaggagctcctccgaggcgacgacgggtacaccatggcggacgtcgtggccatggactcccccaacattgtcacgctcgccgaaggccagtctgcctccgacctcctcaaggccatctgagagcgtgctctgctgctccctgtgctgcttctgttttccacatctgggacgcagtagcttcacttggattgtttcgcctgtgattttggcaggaagatgatgactgcagaattgcatttgcatataccgtatacctgtgcaagcatgagcaaaacatgtcagctaataattctttaatgttttggtcatgcctccgtgaggtatgcttgtgtgcattctataaaagaaaaacgcaagaatgaaagaaagaaatattttcaatgtaagttgatgtttcttcctgacggcttcttacttggattgtctacattaattgtttcaaggaaatacaaggatctcccctctccaaaaaaaaaa

SEQ ID NO: 10 - DNA, 3745 bp, Lolium perenne
gctccgatcccccacccacctcccaatttccccaagccgcatcgcatcacctcgtctcccgagagcaccgcgatggcggggaacgactggatcaacagctacctggaggccatcctcgacgcgggcggcaccgcgggggacatctcggccgcctctgtggccggaggcgatgatgggccgggcgctggcggaggcactgcgggggagaagcgggacaagtcgtcactcatgctccgagagcgcggccggttcaaccccgcgcgctacttcgtcgaggaggtcatctccggattcgacgagacggacctctacaagacctgggtccgcacgtcggccatgagaagcccgcaagagaggaatacgcggctggagaacatgtcctggaggatctggaacctcgctaggaagaagaagcagattgaaggtgaggaagcctcccgtttatcaaagaaacgtcttgaacgtgagaaggctcgtcgagatgctgctgctgatttgtctgaggacctatctgagggagaaaaaggagaaaacattaacggatcatctgttcacgatgagagcacaaggggacgaatgccaaggataggttcaactgatgctattgaggtgtgggcaaatcagcacaaagataaaaaactgtacatagtgctaataagtattcatggtcttatacgtggtgagaatatggagcttgggcgtgattcagatacaggcggtcaggtcaaatatgttgtagagcttgctagggcattaggtgaaacacctggagtatacagagtggatctgctgacaaggcagatttctgcacctgatgttgactggagttacggagaacctacagagatgctgagtccaagaaattctgagaaccttggggatgacatgggtgaaagcagtggtgcttatattgttaggataccttttggaccaagagaaaagtatatacctaaagagcagctctggccccacatacaggaatttgttgatggtgcacttgtccatatcatgcagatgtccaaggttcttggtgaacaagttggtcgtgaacggcgagtatggcctgttgttatccacggacactatgctgatgcaggcgattctgctgctctattatctggggcactcaatgtcccaatggtattcacaggtcattctcttggcagagacaaattagagcaacttttgaagcaaggacgtcaaaccagggacgaagtaaatgcaacatacaagataatgcgtcggattgaagctgaggaactttgtcttgatgcatctgaaattgtaattacaagcactaggcaagaaatagagaaacaatggggattgtacaatggatttgatgtaactatggagaggaaacttagagcaagaacaaagcgtggtgtcagctgctatggtcgttacatgcctcgtatgattgcgattcctcctggcatggagtttagccatattgtgcctcatgatgttgacctggatggtgatgaagcaaatgaagttggctcaggttcaccggatccacctatttgggctgatataatgcgtttcttctcaaaccctcgtaagcccatgattctcgctcttgctcggccagatcccaagaagaacatcactacattggtgaaggcatttggtgaacaccctggattgagaaatttagcaaaccttacactgatcatgggtaaccgtgatgttattgatgaaatgtcaagcacaaatggagctgttttgacctcagtactcaagttaattgacaaatatgatctatatggccaagtggcataccccaagcaccataagcaatctgaagttccagatatttatcgtttggcggcaagaacaaagggggtttttattaattgtgcttatattgaaccatttgggctcaccttgatcgaggctgctgcttatggtctaccgatggttgctacccaaaatggtgggcctgtcgacatacaccgggttcttgacaatggtatccttgttgatccacacaaccaaaatgatattgctgaggcactttataagcttgtttctgataagcacttgtgggcacaatgccgtcagaatggtctggataatatccatcgattttcttggcctgaacattgcaagaactatttgtcacgggttggcacggtgaagcctagacatccacgatggcaaaggagtgatgatgctactgaagtttctgaatcagattcacctggcgattctttgagggatgttcatgatatatctcttaacttgaagctttccttggacagtgaaaaagcaggcaccaagataaatactgaacgaaattccaccaatgccagaagaaatcttgaggatgctgtactaaaattttcaaatgctgttagtgagggcacaaaggatgagtctgatgagaatgctgaggccaccacaggctccataaatggccatctttacggagagaaacacattgttgttattgctgtagattctgtgcaaaatgctgacttggttcagattatcaaaaacctttttgaggcttcacgcaaagaaaaatcatctggtgctgttggttttgtactgtcgacatctcgagcaatatcagagacacttacttttttaacatctgggggcatacaaactactgaatttgatgccttcatatgcagcagtggcagtgatctttgttatccatcttcaagttcggaagacatgcttagccctaccgagcttccatttatgattgatcttgattatcactctcagattgaataccgttggggaggggaaggtttaaggaagacactaattcgttgggcagcagaaaacaacagtcagagtggacaagaagtagttactgaagatgaagaatgttcatccacttactgcatttcatttaaagtgaagaatactgaggctgtccctcctgtgaaggatcttagaaaaacaatgagaattcaagcactgcggtgtcatgtattgtacagccatgatggtagcaagttgaatcttatacctcttctagcatcacgatcccaagcactaaggtacttgtatatacgatggggggtagagctggcaaacatgacagtggttgttggtgaaagtggtgatacagattatgaagggctacttggaggcgtgcacaagaccatcatactcaaaggctcatttaatgctgctccaaaccagcttcatgctgccagaagctattcactggaggatgtcatatcgtttgacaaaccaggaattgcttcagtcgagggatatctcccagatagcttaaaatcagctctacaacagttcggtgtgctgaactaaagtgacaatcttgccatcagcagaacagttaagtagagtatctattctatgtggtccagatcgagaaatgtgcagcaaggcttgtcttcgctgttttaccacgtcttgcatggcagaataagttctggttgaggtttaccttctacaactcttcttgtaaaccaaaagaatttggagctacgaacttggatcagttttttgtccaaggcaaaactcaaggcaataatactgtgccctaccatcagtcacaataaagcaagattgaacatccttcttgagattcgttaatgttttgtaagactagtcatagtggggagtaatttatatgttgtttcatgcattgtattatttattatcttgtaaacccattttgttttggtgtgtgtgatgttattatggtaacatagctagttacccccctattatatttcttcactcaaaaaaaaaa

SEQ ID NO: 11 - DNA, 3735 bp, Lolium perenne
gcgcccgtgcgcacacgtatatagcccgatcaatatcaagttgggatctttagcgccggaggagcggagtagcctgctcgccggcgagggtaattagagcaagaggagtctgctcgccgtcaacaaagatggcggcggggaacgagtggatcaacgggtacctagaggcgatcctggacgcggggtcgaagctgcggccgcagggcgtgcagctgccgccgctggagacagcgccggcgctcgcggccgaggagagcagcgccgcctacaacccgaccaggtacttcgtggaggaggtggtcaggagcttcgacgagcaggccctccacaagacatggacaaaggtggttgcgatgcggaacagccaggagcggagcaaccggctggagaacctgtgctggaggatctggaacgtctccaggcagaagaagcaggtggagtgggattacacgaaagaggtggctcggcggaagcttgagcaggagctgggcagccgggaggccgccgaggacctatccgagctctccgagggcgagaaggacaccaccaccgccaagcccgacgccgcagccgctcaaccgtccgccgacgatggcgagcaccagcagccgcagccacgcacccggctcgcgaggatcaactccgaggtgcggctcgtctccgacgacgaggaggagcagaccaagaagaggaacctctacatcgtcctcatcagcatccatgggctggtgcgcggggagaacatggagctcggccgagactccgacaccggtggccaggtgaagtacgtggtggagctggcgcgtgcgctggcggcgacggcgggggtgcaccgggtggacctgctgacgcggcagatctcctgcccggacgtggactggacctacggcgagcccgtggagatgctggagcgcctgtcgtcggcggacgccgacgacgacgacggcgagcaggccggcggcggtgcctacatcgtgcggctgccgtgcgggccaagggaccagtacatccccaaggaggagctgtggccgcacatccccgagttcgtggaccgcgcgctctcgcacgtcaccgaggtcgcccgcgcgctcggcgagcagctccagcctcctccttctccggccgacggcgcggtggcggcgcccatctggccgtacgtgatccacggccactacgcggacgcggcggaggtggcggcgaacctggcgagcgcgctgaacgtgcccatggtcatgacgggccactcgctggggcgcaacaagctggagcagctgctcaagctcggccgcatgccgggccccgagatccagggcacctacaagatcgcgcgccggatcgaggccgaggagacggggctcgacaccgcggagatggtggtcaccagcaccaagcaggagatcgaggagcagtggggactctacgacggcttcgacctcatggtggagcgcaagctccgggtaaggcagcgccgcggcgtcagcagcctcggacggtacatgccgcgcatggcggtcatcccgcccggcatggacttcagcttcgtcgagacacaggacacggctgacgggacgggccgatctcagatgctcattgctcccgacaaggccaagaaggctctgcctcccatttggtcagacgtgctgcggttcttcacgaacccgcacaagccgatgatcctggcgctgtcgcggccggacccaaagaagaatgtcaccacgctgctcaaggcctacggcgagagccgccagctccgggagctcgcgaacctgacactgatactggggaacagggatgacatcgaggacatggccggtggcggcggcgcggtgctcacggccgtgctcaagctcatcgaccgatacgacctctacggccaggtggcctacccaaagcaccacaagcagacggacgtgcctcacatctaccgcctcgccgccaagaccaagggagtattcatcaacccagctcttgtggagccgttcggcctcacaatcatcgaggctgctgcttatggtttgccggtggtggcgaccaagaacggcgggccggtggacatcctgaaggcgctccacaacgggctgctggtggacccgcactcggcggaagcgatcaccggcgcgctgctgagcctgctggctgagaagtcgcggtgggtggagtgccgccgcaacggcctccgcaacatccaccgcttctcgtggccgcaccactgccgcctctacctctcccacgtctccacctactgcgaccagccctcgccgcaccagccgctccgcgtgcccctcgccctgggctcctccaccagcttcggcgccgacgactcgctctcggactcgctccgcggcctctcgctccagatatccgtggacgcctccagcgacctcaacgccgcggactccgcggccgccatcatggacgcgctccgccggcgcccggcatccgagaagccggcgagctccggtgccagggcgctcggcttcgcgcccggccggcgggagagcctcctggtggtggccgtcgactgctacggcgacgacggcaagcccgacgtcgagcagctgaagaaggccatcgacgcggcggtgtcggttggtgaatgcgcgggagcgaagcaggggtacgtgctgtcgaccggcatgaccatccccgaggccgcggaggcgatcaaggcatgcggcgccgacgttgccagcttcgacgcgctgatatgcagcagcggggccgagctatgctacccgtggaagaagctcgtggccgacgaggagtactccgggcacgtcgcgttccggtggcccggtgaccacgtgaaatccgccgtgcccaggctcgggagcatggaggagatcgccctcgcaatcgatcggcccgcctcctccgtgcactgccacgcctacgccgccacggacgcatccaaggtaagcataacagagcactacttgtagtaaccactaaccagcacggtacatggtctcctccatgcctaagcttctgatgcgtggggttttgggcaggtgaagaaggtggattcgatcaggcaggcgctgcggatgcgcggcttccggtgcaacctcgtctacacgcgcgcctgcacgcgcctcaacgtcatccccctctccgcttcccggccgcgcgctctcaggtacctgtcgatacagtgggggatcgatctctccaaggtggcggtgctcgtcggcgagaccggcgacaccgaccgcgagaggctcctcccgggagtgcacaggacgctcatcctgccggggatggtcgcccgcggcagcgaggagctcctccgaggcgacgacgggtacaccatggcggacgtcgtggccatggactcccccaacattgtcacgctcgcggaaggccagtctgcatccgacatcctcaaggccatctgagagcatgctctgctccttgtgctgcctctgttttccacatcccggacgcagtagctccacttcgattatttcacctgtgattttggcaggaagatgactgcagaattgcatttgcatataccgtatacctgtgcaagcatgagcaaaacatgtcagctaataattcttttatgttttggccatgcctccgtgaggtatgcttgtgtacatactataaaggaacagagagagaaacgcaagaatgaaagagagaaatattttcaatgtaagttgatgtttcttcctgacggcttcttacaatggcttgtctacattaattgtctcaagaaaaaaaaaa

SEQ ID NO: 12 - DNA, 2716 bp, Lolium perenne
gcttctcccctcacacgcctcgccatttgttttgtgtcctgagccatggctgccaagctgactcgcctccacagtctccgggagcgccttggtgccaccttctcctcccatcctaacgagctcattgccctcttttcaaagtatgttcaccagggcaaaggaatgcttcagcgccaccagctgctcactgagtttgaagccttgtttgaggctgacaaggagagatatgcaccctttgaagacattctccgtgctgctcaggaagcaattgtgctgcccccatgggttgcactggccatcaggcctaggcctggtgtctgggactacatacgggtgaatgttagcgagttggctgttgaggagctgacagtttccgagtacctggcattcaaggaacagcttgttgatgagcacgccagcagcaagtttgtgcttgagcttgattttgagcctttcaatgcctccttcccacgtccttccatgtccaagtccattggaaatggggtgcagttccttaaccgtcacctgtcttccaagctgttccaggacaaggagagcctctacccactactgaacttcctgaaagcccataaccaccagggcacgacaatgatgctaaacgaccgaattcagagccttcgtgggctccaatcagcccttagaaaggcagaagagtatctaacgagcattcctgaagacaccccgtcctctgagttcaaccacaggttccaagagcttggcttggagaagggttggggcgacaccgctaagcgtgtacaggacaccatccacttgcttcttgatctacttgaggcccctgatccagccagcttggagaagttccttggaactataccaatgatgttcaatgttgttatcctgtctccacacggatattttgctcaatccaatgtgttgggataccctgatactggtggccaggttgtgtacatcttggatcaagtccgtgctttggagaatgagatgcttctgaggattaagcagcaaggccttgacataacccctaagatcctcattgtcaccaggctgttgcctgatgctgttggaactacatgtggccagcggctggagaaagttattgggactgagcacactgacattctccgtgttccattcagaactgagaaggggatcctccgtaagtggatctctcgttttgatgtctggccatacctggagacatacaccgaggatgttgcaaacgaactcatgagagaaatgcagaccaagcctgatctcattattggcaactacagtgacggtaaccttgtcgccactctgcttgcgcataagttgggagttacccagtgcaccattgcccatgctttggagaaaacaaaataccccaactcagacatatatttggacaaattcgacagccaataccatttctcatgccagttcactgctgaccttattgccatgaatcacactgatttcatcatcaccagcacattccaggaaattgctggaagcaaggacagcgtgggccagtatgagtctcacattgctttcaccctccctgatctctaccgtgttgtccatgggattgacgtgttcgatcccaagttcaacattgtctctcctggagcagatatgactgtctacttcccatacactgaaactgacaagaggcttactgccttccaccctgaaattgaagagctcctttacagtgatgttgagaactctgaacacaagtttgtattgaaggacaagaacaagcctatcatcttctcaatggctcgtcttgaccgtgtgaagaacatgacaggcttggttgagatgtttggtaagaatgctcatctgaaggatttggcaaaccttgtgattgtcgctggtgaccatggcaaggagtccaaggatagggaggagcaggctgagttcaaaaggatgtacagtctcattgaggagtacaagctggagggccatatccggtggatctcagctcagatgaaccgtgttcgcaatgcagagttgtaccgctacatttgtgacaccaagggcgcatttgttcagcctgcattctatgaagcatttggcctgactgttgtcgaggccatgacatgtggtttgcccacaatagcgacatgccatggtggcccagctgaaatcattgtgaatggtgtgtctggtttgcacatcgatccttaccacagtgacaaggctgcagatatcctggtcaacttctttgagaaatccacggcagatccaacctactgggacaaaatgtcggaaggtggcctgaagagaatttatgagaagtacacctggaagctgtactcagagaggctgatgaccctgactggtgtatatggtttctggaagtatgtgagcaaccttgagaggcgtgagactcgccgttaccttgagatgttctacgctctgaagtaccgcagcctggctgctgcagttccattggccgtcgatggcgagaacacggacaattagtgcgggacatgaagaggcgccttcaaagggcgaggtgtcggctgcgttatgatttgattgtctaccggagttttcatttggtctattgtggagtgtgtacttggatgtctcaggcacttctgtgaggttttgggcagttctttgctggttcctgctagctgcatatgttgtcttcaataaacgcctgcccgtattgttcatctcttataattcaatgcaatcttctgttgcctaaaaaaaaaaa

SEQ ID NO: 13 - DNA, 2754 bp, Festuca arundinacea
gctggggttttgttgctcctgtctatttattatcccctctggatcttgagaaaccctccgccgtttggcttctcccctcgcccccttcaccatttgttttgtgtcctgagccatggctgccaagctgactcgtctccacagtctccgggagcgccttggtgccaccttctcctcccatcccaacgagctcattgccctcttttccaagtatgttcaccagggcaaaggaatgcttcagcgccaccagctgctcactgagtttgaagcattgtttgagtctgacaaggagaggtatgcaccttttcaagacattctccgtgctgcccaggaagcaattgtgcttcccccatgggttgcacttgccatcaggcccaggcctggtgtctgggactacataagggtgaatgttagcgagttggccgttgaggagctgacagtttccgagtacctagcattcaaggagcagcttgttgatgagcacgccagcagcaagtttgtgcttgagcttgattttgagcctttcaatgcctccttcccacgtccttccatgtccaagtccattggaaatggggtgcagttccttaaccgtcacctgtcttccaagctgttccaggacaaggagagcctctacccactactgaacttcctgaaagcccataaccacaagggcacgacaatgatgctaaacgacagaattacgagccttcgtgggctccaatcagcccttagaaaggcagaagagtatctaacaagcatccttgaagacaccccgtcctttgagttcaaccacaggttccaagagcttggcttggagaagggttggggtgacaccgctaagcgtgtacaggacaccatccacttgcttcttgatctgcttgaggcccctgatccagccagcttggagaagttccttggaactataccgatgatgttcaatgtcgttatcctgtctccacacggatattttgctcaatccaatgtgttgggataccctgataccggtggccaggttgtgtacatcttggatcaagtccgtgctttggagaatgagatgcttctgaggattaagcagcaaggccttgacataacccctaagatcctcattgtcaccaggttgttgcctgatgctgttggaactacatgtggccagcggctggagaaggttattgggactgagcacactgacattcttcgtgttccattcagaactgaaaaggggatcctccgtaagtggatatctcgttttgatgtctggccatacctggagacatacaccgaggatgttgcaaacgaactcatgagagaaatgcagaccaagcctgatctcattattggcaactacagtgacggtaaccttgtcgccactctgctcgcgcataagttgggagttacccagtgcactattgcccatgctttggagaaaaccaaataccccaactcagacatatatttggacaaattcgacagccaataccatttctcatgccagttcactgctgaccttattgccatgaatcacactgatttcatcatcaccagcacattccaggaaattgctggaagcaaggacagcgtgggccagtatgagtctcacattgctttcaccctccctgatctctaccgtgttgtccatgggattgacgtgttcgatcccaagttcaacattgtctctcctggagcagatatgagcgtctacttcccatacactgaaactgacaagaggcttactgccttccaccctgaaattgaagagctcctttacagcgatgttgagaactctgaacacaagtttgtattgaaggacaagaacaagccgatcatcttctcaatggctcgccttgaccgtgtgaagaacatgacaggcttggttgagatgttcggtaagaatgctcatctgaaggatttggcaaaccttgtgattgtcgctggtgaccatggcaaggagtccaaggatagggaggagcaggctgagttcaaaaggatgtacagtctcattgaggagtacaagctgaagggccatatccggtggatctcagctcagatgaaccgtgttcgcaatgcggagttgtaccgctacatctgtgacaccaagggcgcatttgttcagcccgcgttctatgaagcatttggcctgactgttatcgaggccatgacatgtggtttgccgacaatagcgacatgccatggtggcccagctgaaatcattgtggatggtgtgtctggtttgcacatcgatccttaccacagtgacaaggctgcagatatcctggtcaacttctttgagaaatccacggcggatccaacctactgggacaaaatgtcggaaggaggcctgaagagaatttatgagaagtacacctggaagctgtactcagagaggctgatgaccctgactggtgtatatggtttctggaagtacgtgagcaaccttgagaggcgtgagactcgccgttaccttgagatgttctacgctctgaagtaccgcagcctggcagctgcagttccattggctgtcgacggcgagaacaccgacagttagtgcagaggcgcctttcgcgggcaaagtattggctgcgttatgatttgtctaccgtagtttccatttggtctattatggggtgtgtaccttgatgttggggtgtgtaccttgatgtttggcactttcctgaggtttctgggcagtgctttgctggttcctgctagctgcatatgttgccttcaataaacgcctgcccatattgttcaaaaaaaaaa

SEQ ID NO: 14 - DNA, 2950 bp, Lolium perenne
ttcttcctcgtggtgcgttgcgtttgtcgggttcttctgaagaagcggaaggtttgagcaatgggggaagccgccggcgaccgtgtgctgagccgcctccacagcgtcagggagcgaatcggcgactccctctccgcccaccccaatgagctcgtcgccgtcttcaccaggctggtcaaccttggaaagggaatgctgcagccccaccagatcatcgctgagtacaacactgcaatccctgaagcagagcgcgagaagctcaaggacggcgccttcgaggatgtactgagggcagcgcaggaggcaatcgtcatctccccatgggttgcacttgccatccgccctaggcctggtgtctgggagtatgtgagagtcaacgtgagcgagcttgctgtcgaggagttgagtgtccctgagtacttgcagttcaaggaacagcttgtggaaggaagcaacaaagacttcgtgcttgagctggactttgagccattcaatgcctccttccctcgtccttccctgtcgaagtccattggcaacggtgtgcagttcctcaataggcacctgtcatcaaagctcttccatgacaaggagagcatgtaccctttgctcaacttcctccgtgcacacaactacaagggcatgcctatgatgatgaacgacagagtccgcagtctaagtgctctccagggagctctgaggaaggccgaggagcatctgtctggtcttccagcagacaccccgtactcggacttccaccacaggttccaagaacttggtttggaaaagggctggggtgattgtgccaagcgtgcgcaagagacccttcacctgctcctcgaccttcttgaggcacctgacccgtccacacttgagaagttccttggtacaatcccaatggtgttcaatgttgtcatcctctctccacatggttactttgcacaagccaatgtcttggggtaccctgacaccggagggcaggttgtctacattttggatcaagtccgtgctatggagaatgagatgcttttgaggatcaagcagcaaggactcgatatcacaccacggatccttattgttaccaggcttctccctgatgcaaccggtacgacctgcggtcagcgtcttgagaaggtcctcggtactgagcacacccacatccttcgtgtgccattcagaactgaaaatggaattgttcgcaaatggatctcacgttttgaagtctggccatacctggagactttcactgatgatgtggcgcacgagatttctggagagctccaggccaaccctgacctgatcatcggaaattacagtgatggaaaccttgttgcatgtttgcttgcacacaagatgggcgttactcattgtaccattgcgcatgcgcttgagaaaaccaagtaccccaactctgacctgtactggaagaagtttgaggatcactaccacttctcatgccagttcaccactgacttgattgcaatgaaccacgcggacttcatcatcacaagtaccttccaagagattgctggaaacaaggacaccgttggtcagtacgagtctcacatggcattcacgatgcctggaatgtaccgtgttgtccacggtatcgatgtttttgaccccaagtttaacatagtttcgcctggtgcggacatgtccatctacttcccgtactcagagtcacaaaggaggctcacctcactccacccagagattgaggagctgctctacagtgatgtcgacaacgatgagcacagttgtctgaaggacaggaacaagccaatcatcttctcgatggctcgtctggaccgtgtcaagaacttgactggtctggttgagctgtatggccggaaccctcgcttgcaggagcttgttaaccttgtggttgtttgtggtgaccatggcaacccatcaaaggacaaggaggagcaggctgagttcaaaaagatgtttgaccttattgaacagtacaacctgaatggccatatccgctggatctctgctcagatgaaccgtgtccgtaatgctgagctctatcgctacatctgcgacaccaagggtgcttttgtgcagcctgcattctatgaggctttcgggctaactgtcatcgaggccatgacctgtggtcttccaacatttgcaactgcatatggtggtccagctgagatcatcgtgaacggtgtctccggctaccacattgatccttaccagggtgacaaggcctcggctctgctcgttgagttctttgagaagtgccagggagaccacagccactggaccaagatctcactgggagggcttcagcgtattgaggagaaatacacctggaagctttactctgagaggctgatgaccctcaccggtgtctatggcttctggaagtacgtctccaaccttgagaggcgtgagacccgccgctacctggaaatgctgtacgcgctcaagtaccgcaccatggccagcactgttccattggctgtcgagggggagccctcgagcaagtgatctggccacctatcggccggaagaagaagaagaaggttggcttcgatttctgaaagatttgagatttgagaatgcgttggttttcttcctaggcgctgctcttttagagttaaggtcgagttgatgtgctagtttgattcagcagtgggagtgagttgagacagaaggatgtggtgtgtgccagtattgttggtgcttttcgtgttctttggatgttacccttgaataatagtagcggccttggcgccgtttctgaaataatagtagcatccttgctcgttgccaagaaaatcttagtttttttttctcttgaacaagtggcaaagcgacctctgcatctatctctgtcattgacatttagctctgttgcggtgcactggataccttacattgctctagagaacagcaataaaagccggaccatgtgattgctgtaaaaaaaaaa

SEQ ID NO: 15 - DNA, 2825 bp, Festuca arundinacea
gcgcgtttcccctacctgtgacgttcccgtgtttccccttccgggcgctctcgcctccttcttcctcagagcaaggtttgaggatccgactggaggatagcaatgggggagagtgcaggagagcgtgctctgagccgtctccacagcgtaagggagcgtatcggcgattccctctcagcgcacaccaatgagctcgtcgccgtcttctcaaggcttgttaaccatggaaagggaatgcttcagccccaccagatcactgctgagtacaatgctgctattcccgaggctgagcgagagaagctgaaggataccgcctttgaggatctcctaaggggggcacaggaggcaattgtcatccctccatgggttgctctcgccatccggccaaggcctggcgtctgggagtatgtgagggtcaatgtgagcgagctcggcgttgaggagttgagtgtccctgagtatttgcaattcaaggaacaattggtgaatgaaagcactgataacaactttgtgcttgagctggactttgggccattcaatgcctccttccctcggccatcgctgtcgaagtctattggcaatggtgtgcagttcttgaacaggcacctgtcatcaaagctgttccatgacaaggagagcatgtaccccttgctcaacttcctccgtgcacacaactacaaggggatgaccatgatgttgaacgacagaattcgcagtctcagtgccctccaagatgcactcaggaaggcagagaagcatctgtcaggccttccagctgacaccccgtactcagagttccaccaccggttccaggaacttggtttggagaaaggttggggcgactgtactcagcgtgcacacgagactattcaccttctcttggaccttctcgaggcccctgatccatccaccttggaaaagtttctcggaacaatcccaatggtgttcaatgttgtcatcctctctcctcatggttactttgctcaggccaatgtcttggggtacccagacactggtgggcaggttgtctacattttggaccaagtccgtgctatggagaatgagatgctattgagaatcaagcagcaaggtcttgacattacaccaaagattctaatagtcaccaggttgctccctgatgcacacggcaccacctgcggccagcgccttgagaaggtccttggcactgagcacacccacattctgcgtgtgccattcaaaacagaagatgggattgttcgcaaatggatctcacgttttgaagtctggccttacctggaagcttacaccgatgatgtggcacatgagattgctggagagctgcaggccaaccctgacttgatcattggaaactacagtgatggaaaccttgtcgcgtgtttgttggcacacaagttgggggttactcattgtaccattgctcatgccctagagaaaaccaagtaccccaactctgacctttactggaagaaatttgaggatcactaccacttttcctgccagttcacagctgacctgattgcaatgaaccatgctgacttcatcatcaccagtaccttccaagagattgctggaaacaaggatactgtagggcagtatgagtcgcacatggcattcacaatgcctggcctctatcgtgttgtccatggtattgatgtcttcgaccccaagttcaacatcgtctcccctggtgctgacatgaccatctacttcccatacactgaacaacagaagaggcttacctccctccatgctgagattgaggagctactcttcagtgatgtcgagaattctgagcacaaatttgtgctgaaggacaagaacaagccaatcatcttctcgatggctaggctggaccgtgtcaagaatatgactggcctggttgaactgtatggccggaacccacgcctacaggagctggtaaaccttgtggttgtctgtggagaccatggaaaagagtccaaggacaaggaggagcaggccgagttcaagaggatgtttgatcttatcgagcagtacaacttgagcagccacatccgctggatctctgctcagatgaaccgtgtacgcaacggtgagctctaccgctacatctgcgacatgaagggagcctttgtgcagcctgctttctatgaggccttcgggcttaccgtgatagaggccatgacatgtggcctccccacattcgccactgcatacggtggtccagctgagatcattgtgaatggcgtgtctggctaccacatcgatccataccagaatgacaaggcctctgcgctgctcgtggagttctttgagaagtgccaggaagacccaagccactggaacaagatctcgcagggcggactccagcgcatcgaggagaagtacacctggaagctgtactctgagaggctgatgaccctctctggtgtctatggtttctggaagtacgtctccaaccttgacaggcgtgagactcgtcgctaccttgagatgctctacgctctcaagtaccgcaaaatggctaccaccgttccattggctattgaaggcgagaccacaggcaaatgatttggcctcatcgaagaaataaaagggcggaccagcgccccactttcccattcctgattcagcattgaagcacagatcggagagttttatgcctttgcttttcctaggttgtagtttgagggaagttggttcccgtgagagtctctgtgttgtctgtggtagaggaactggatgtgagggatgtactcagtgctccggttggtactttttcatggatgctatgatttgaatgaataataagataagtctttgtttaccccccaaaaaaaaaa

SEQ ID NO: 16 - DNA, 1599 bp, Festuca arundinacea
gctggatcatacttgaacccgcaatagaaccggatacaccaggtgacataaaaggttgctggtccgcctcagccacagttatatctggtagtcaaccggtcatcatgtacaccggtggcgatgtagagaatcatcaggttcaaaacattgcgcttcctaagaaccggtctgacccgtaccttatagaatggaccaaggcatgcaataacccagtgctccaaccggttggaccaggaatgaacccaggcgagttcagggatccgacgacaggttggatcgggccggatggactatggagaatatcaattggagctgaggtgaacggttacagtgcagcacttttgtacaagagtgaagactttctgaattggagtagagttgatcacccactgtattcatccagtgcctccactatgtgggagtgcctggacttcttcgcggtattaccgggcagtaacggtggactggacctgtccgcagctattccgaaaggcgccaaacatgtcctcaaagtcagcgtggatcaatgtgacaagtacatgattggggtttatgatctcgaacatgatgcttttgtgcctgatactatcctcgatgaccgttggttgttgccgaggatcgattacggcaattactatgcttcaaaatcgttcttcgactcgaaaaataggaggaggatcatatggggttggactaatgagtcagatagttcttcagatgatgtcgcaaaaggctgggcaggtatctatgcaattcccaggacaatttggctagaccgtgatggcaagcagttgctgcaatggccagttgaagagattgagtcccttcgaagaaatgaaatcaactatcaaggactagatctggagaagggagatctttatgagattaagggagttgacactttgcaggctgatgtggagatagattttgagctgacgtctattgatgatgccgactcttttgatccttcctggcttttggatcccgaaaagcattgccgggaagcgggtgcatcagttcatggtggtatagggccatttggacttgttattctggccaccggcgacatggaggagcacactgttgtgcacttcagagtctacaaatcacagaaagaatacatgatactcatgtgctctgatataagaaggtcttccctgagacaaggactgtacgcacctgcctatggaggcttctttgaatttgatcttgaaaaggaaaggaagatatctctgagaactctaattgatcggtcggcggtggagagctttgggggcggtggcagggtctgtatcatagctagagtttatccagtggcgattgtcgatgacgggagtgcccacatgtatgccttcaacaatggaagtaccacggtcagggtgccacagatcagggcatggagcatgatgacagcacaagtgaatttaaagaaaggctgaagtgatgattaacacagaaaagctaattccttttattgattctttctcttattcatgagcactcattcgtacaaataaacggaaattcaacaggcatatgtaattgattgtttccttgatctcaattattcatatactataattattattaaaaaaaaaa

SEQ ID NO: 17 - DNA, 2010 bp, Lolium perenne
gctcgtcttcccctattaactgcgcatggggaatccgaaatgggtcctggcgccatgggcggtgctgcttctcctgcagctcgcctccgcatctcaccatgcccgcctgagcctggagacctcggccgcgtcgccgtcggtcccagcctccattgttagcccgctgctcaggacaggctaccacttccagccccccatgaactggatcaacgatccaaatgggccgttgtactacaagggatggtatcacctgttctaccagtacaaccccaagggcgcggtgtggggcaacatcatctgggcgcactcggtgtcccgcgacctgatcaactggatcgcccttgagccggcgatctcgccgaccatcccgacggaccagtacggcgtgtggtccggttcgacgacgatcctccacgacggcactccggcgatcctgtacacggggatcgaccggccgagcgtcaactaccagatccagaacatcgccctgcccaagaacgcgtcggaccctctcctccgggaatggtacaagccggggtacaacccgatcgcggtgccggtggaaggtataaacgcgacgcagttccgcgacccgaccaccgcgtggttcgccggcaggcactggcggatgctcgtcggcgggctgaggccgggcacgctccgcggggaggcgattctgtaccggagccgcgacttcaagcactgggtccgcgccaagcacccgctgcactcggcgctcaccggcatgtgggagtgcccggacttcttcccggtgggcaaggccggggtggagaagggcctggacacctccgagtacggcgcggcggcgggcgtggagaagcacgtgctgaagaacagcctcgacctcacccgctacgactactacaccatcggcacgtacgacaacgtcaaggagcggtacgtgccggacaaccccaccggcgacgtctaccagcgcctccagtacgactacggcaacttctacgcgtccaagaccttcttcgaccccgtgaagcagcgccggatcctcctggggtgggccaacgagtccgatagcgtggcccacgacaaggccaagggctgggccgggatccaggcgattcccaggaagatatggcttgaccccagcggcaagcagctggtgcagtggccggtggaggagctcgagaagctccggggcaagcctgtcaacgttggcgacaaggtcgtcaagcccggccagcattttgaggtcacgggcctgcagtcataccagtctgacgtggaggtgagcttcgaggtatcgagcctggataaggctgagcccttcgatccggcctacagcaacgacgcgcagaagctctgcggcatcaagggcgccgatgtcaagggcggggtggggccttttgggctttgggtgctgtcctctgccgacctagcagagaagactgcagtgttcttcagagtcttcaaggatggatacggcaaacctatcgtcctcatgtgcagcgaccccaccaagtcatctcttaccccagatctatacaagccgactttcgccgggttcgtcgacaccgacatttcgtccgggaagatctctctgagaagcttgatcgatcggtcggtggttgagagcttcggcgcgggagggaagacctgcatcctatcaagggtgtacccgtctatggccctagggaaagacgcgcaccttcacgtgttcaacaacggggagacggatatcaaggtgtccaagctgaccgcgtgggagatgaagagaccattgatgaatggcgcctaagcatgcaccatctccgacgagttttcgcttcctcgcatttcgtggtttcacttcactgatattcagtgcctcgattgctcactcaagagctctatgatcacatatgattgcaaattttgttgcaaaattcatgggttgggtaccgtggtgtacgtacaaataaagatattgtttaatttccacacgtctaaatataataatgaagagctagcttcatattttctaaaaaaaaa

SEQ ID NO: 18 - DNA, 1389 bp, Lolium perenne
gggcgtggggtccctgctggtgtaccggagcgcggacttcctccgctggcagcgcaacgccgcgccgctgcacgccagctcgcgggacgtgcccgtgctggagtgcccggacctgttcccggtggctgcggcggcgcagggcgcgacggaggggctcgagacttcggcaccgagcggcgccggggtgaggcatgtgctcaagctcacggacttcgccaaggaggaccactacatggttgggttttacgacgacgtggcggacaccttcgtgccggcggagcccgagcgcggcgacgaccccgacaactggcgccggctcgaccacggccacctgtacgcgtccaagtccttctacgacgcgcgcaacaagcggcgcatactgtgggcgtgggtggacgagaccgacggtggcggcgtcgccaggggctgggccggcatccaggcgttcccgagggcgatgtggctggacgccgacgggaagcggctggtgcagtggcccgtggaggagatcgagacgctgcggaggaagcgggtcggcctgcggtgggcgacggacgtggaggccggcggcaggaaggagatcgccggcatcgtgagctcgcaggcggacgtggaggtcgtgttcgagatcccgaacctggaggaggccgagacgttggaccccgagtgggtgctggatccgaaagggctgtgcgcggcgaagggcgcgtccgtgcacggcggcgtcggcccgttcgggctgctcgtcttggcctccggtgacctggaggagcacactgctgtgttcttcagggtgttcaagcacgatggcaagtacaaggttctcatgtgcaccgatctcacaaagtcatctacgaaagcaggggcacacaagccatcctatggagcatttcttgatgtggacgtggagaaggacaagttcatatcgctcagaacattgatcgatcacacggtggtggagagcttcggcgacggcgggaggacgtgcatgacggctcgtgtgtaccccgaacacgcggcgatgggaagcacccacctgtacgtgttcaacaacgggacaggtgccgtaaaggtgtccaaacttgaggcgtgggagctggcgacggcggccgtgaacggcggctcgcttgcacccgtcgtcgtcaaggcatccgaccctaaagaggccttgtagttttagggtatgcccgggatggtggctgcttagatgatgtccgtcgttgatttatgcttgttggtcgagttatgagtttcgggtaggatgatttatgcggaaatgcaattttagtggcgtcatgacctattggacaaacatctgtcattggaaaaacgtggtgatatgtccacgcccatatctaaaggtataatagaggcatcccaaaaaaaaaa

SEQ ID NO: 19 - DNA, 2231 bp, Festuca arundinacea
gctgtccactgcctctcgtcccacccgctctctctgttgctaagttggttggtttgccatggcgggcctccgtctcgccgcgtgcgcggccgtcgccgtgctactctgcctcctcctctcgtcctccgccgccctccgatggctctctgaccccgcgcctgagagcgccgccgccggagtcagccacgacagctaccggaccgcctaccacttccagcccacggagaactggcagaacgatccgaatgggccgatgtattacaagggcgtctaccacttcttctaccagtacaacccgtaccgcgcgacctggggcaacggcaacctctcctggggtcactccgtctccgtcgacctcgtaaactggtccgccctcgagaacgccatggacccggactcctccttcgacatcaacggctgctggtcgggctccgccaccatactccccgacggcaccccggtcttcctctacaccggcatcgacgccgacaacaaccaggtccagaacgtggccttccccaagaacgcctccgacccgctcctccgcgagtgggtgaagcccagctacaaccccgtcatcgcgctccccgacgacgtcgtgcacgacaacttccgggacccctccacggcctggctcggccgcgacggcctctggcgcgtcgccgtctccgcagggctcaaggacggcacggggaccacgctggtctaccgcagcaaggacttccggcagtgggagcgcaacgccgagccgctctactcgtcgagcgacgccggcatggtggagtgcccggacctgttccccctggcggagcccggcgaccagcacgggctcgactacacgccctcgaacggcgcggcggtgagttatgtgctgaagcagagcgttatggacacgctcagtgactactacgtgctggggcggtacgacgacgccgcggacaccttctcgccggtggaggcggacaacgactgccggacatggcagcgcttcgactacggccacgtctacgcgtccaagtccttctacgacgcgggcaagaagcggcgcgtgctctggagctgggccaacgagtccgaccccgaggccgactacctcgccaggggctgggccggcgtgcaggccgtcccgaggaggatctggctggacagcaaggggaagcagctgctgcagtggccgatcgaggagatcgagacgttgaggaagacgcgggtcgggttgctgggagcggagatgaacgccggcggcatgaacgagatcatcggcgtcgccggcgcgcaggcggacgtggaggtggtcttcgaggtcccgtccctggagggcgccgagaacctcgaccccaaccagctgcttgacccacagaggttgtgcggcgagaagggcgcgtccgtgcttggcggcgtcggcccgttcgggctgctcgttctggcctccggcgacctccaggagcacacctccgtcttcttcagagtgttcaggcacgagggcaagtacaaggttctcatgtgcaccgacctcagaagatcgactacgagagccgacgtgtacaagccgccgtacggagggttcgtggacatcgacatcgagaaggagaggagcatatcgctcaggacactggtcgaccactcggtggtggagagctacggcggcggcggccggacggtcatcacggcgcgggtgtacccggagcacgcggcgacgaccaacagccgcctgttcatgttcaacaatggcaccggcgccgtgaaggtgtccaagctcgatgcgtgggagctggcgccggcgaaagtgaacgtcccgggcgacgggctcatcaccgctggctcctcgatgcacctacgcgaagcgtattaggaggagattgtgattagtagttcgttcggtgaatggccaattgtgtggccgattggacttccctggccaaattacggtcttttgggggttcatttggggaatttgtagcagtgtctttcaggatagtaaagtacagtagtacgtagtaagaagggtagtcgaagtctcgaagagcgttttgctgatttgggatgcatttgggagatttgtttagtactgcatgtcagcgattgtgagtagtatctgtcaggatagtatataagtagtaagaaagaagagtagtcgaagagtggttgctgattaacacatgtcagcgaacagtccgcgtcttgtttattctttgcaaaagaaatagagaaagtacatatcaaaaaaaaaa

SEQ ID NO: 20 - DNA, 1319 bp, Festuca arundinacea
cttgaactcaactgagttcagggatccgacaactggttggatcggaccggatgggctatggagaatagcaattggtgctgagctgaatggctacggtgccgcacttttgtacaagagtgaagactttctgaattggactagagttgatcacccactgtattcagacaatgccccctcaatgtgggagtgcccagatttcttcgccgtattgccaggcaataacggtggactggacctgtctgcggcgatcccgaaaggcgccaaacatgtcctcaagatgagcgtggattactctgacaagtacatgattggggtttatgatctcaaacgtgatgcctttgttccggatgttgtcctagatgaccgtcggctgtggttgaggattgattacggcacattctatgcttcaaaatccttcttcgactcgaaaaggggcaggagggtcatatggggttggtccaacgagacagatagtgtttcagatgatggtgcaaaaggttgggcaggtatccatgcaatccccaggtcaatttggttagacagcgatggcaaacagttgctgcaatggccgattgatgagattgagtcccttcgaagagatgaaatcaaccatcaaggactagagctgaagaacggagacctatttgagattaagggaattgacactttgcaggctgatattgaagtagattttgagctgacgtccatcgacagcgccgatccttttgatccttcctggcttttggatgtcgagaggcattgccgggaagcaggtgcatcggttcaaggtggcatagggccatttggacttgttgtcctggcgtctgacaacatggaggagcacattgctgtgcacttcagagtttacaaatcacagaaaagccacatgatcctcatgtgctctgatctaagaaggtcttctctgagatcaggactgtacacaccagcctatggaggcttctttgaatttgaccttgaaaaggaaaggaagatatctctcagaactctgattgatcggtcagcggtggagagctttggcggcggtggcagggtctgcataacggccaggatttatccagtggcgcttgtcgacggcagggtccacatgtatgccttcaacaatggaagtaccacggtcagggtgccacaactcggggcatggagcatgatgacagcacaagtgaacgtgaataagggttgaagtgatggttaacacagaagagcagtttcattttcttaattagcgtactctcattcaggagcactccttggtacaattgaaaggaaattcgacaggaagtagttggtcaaaaaaaaaa

SEQ ID NO: 21 - DNA, 1995 bp, Festuca arundinacea
ggtcttccactaataactgcgcaagcaatggggaatccaaaatggatcttcgcgccatgggcggtgcttctgctcttcctcctgcagctcgcctgcgcatctcaccatacccgccggagcctggagaccgaggccgcgtcgccgtcagtaccagcttccattgttagcccgctgctcaggacgggctatcacttccagccccccatgaactggatcaacgatccaaatgggccattgtactacaagggctggtaccacctgttctaccagtacaaccccaagggcgcggtgtggggcaacatcatctgggcgcactcggtgtcccgcgacctcatcaactggatcgccctggagccggcgatcacgccgagcatcccgacggacaagtacggcgtgtggtccggttcgacgacgatcctccacgacgggacgccggcgatcctgtacacggggatcgaccggccgagcatcaactaccagatccagaacatcgcgctgcccaagaacgcgtcggacccgctcctccgggaatggtacaagcctgggtacaacccgatcgccgtgccagtggccggcatgaacgcgacgcagttccgcgacccgaccaccgcgtggttcgccggcaggcactggcggatgctggtggggggcctccggccggggacgctccgcggggaggcgatcctgtaccggagcctcgacttcaagaactggacccgcgcccaccacccgctgcactcggcgctgaccggcatgtgggagtgcccggacttcttcccggtgggcgaggccggggtggagaagggcctggacacctccgagcacggtgaaggggtggagaagcacgtgctgaagaacagcctcgacctcacccgctacgactactacaccgtcggcacgtacgacaacgtcaaggagcggtacgtgccggacaaccccaccggcgacgtctaccggcgcctccagtacgactacggcaacttctacgcgtccaagaccttcttcgaccccgtgaagcagcgccggatcctcctggggtgggccaacgagtccgacagcgtggcccacgacaaggccaagggctgggccgggatccaggcgattcccaggaagatatggcttgaccccagcggcaagcagctggtgcagtggccggtggaggagctggagaagctccggggcaagcctgtcaccgtcggcgacaaggtcgtcaagcccggccagcattttgaggtcacggggctgcagtcataccagtctgacgtggaggtgagcttcgaggtgtcgagcctggataaggccgagccgttcgatccggcctacagcaacgacgcgcagaagctgtgcgggatcaagggcgccgatgccaatggcggggtggggccttttgggctcgtggtgctggcctctgccgacctggcagagaagactgcagtgttcttcagagtcttcaaggatggatacggcaaacccatcgtcctcatgtgcagcgaccccaccaagtcatctctcaccccagatctatacaagccgactttcgccgggttcgtcgacaccgacatttcatccgggaagatctccctaagaagcttgattgaccggtcggtggttgagagcttcggcgcgggagggaaaacctgcatcctgtcaagagtgtacccgtccatggccctagggaaaaatgcgcaccttcacgtgttcaacaacggggagacggatatcaaggtgtccaagctgaccgtgtgggagatgaagagacccttgatgaatggcgcctaagcatgcaccatctccgacaagttttcggtttctcgcattttgtggttttagttcactgatgttcagtgcctcgattgctcgctcaggagctctatgatcagatatgattgcaaattttgttgcaaaattcatgggttgggtaccgtggtgtgtatgtacaaataaagatgttgtttaatttccacgcttctaaatataatagtaacaaaaaaaaaa

SEQ ID NO: 22 - DNA, 1760 bp, Lolium perenne
ggatggcttggtgacctttggaattctccggcaacacaaaagatccaaatggaccaatgtactacaatggtatctaccatgagttctaccagtacaaccccaatggctccctctggggtaacataatttggggccattcagtttcgacggacctcatcaactggatcccagtagaacctgcgatagaacgggatatcccaagtgacataaacggttgctggaccggctcagccacaattatttccggtgatcaaccaattatcatatacaccggagccgacaaggagaaccgtcagctccagaacattgtgcttcccaaaaacaagtctgacccgtatctgagggagtggacaaaagcaggtaataacccggtgatccaaccagtcgggccaggcttgaatgcgagccagttcagggatccgacaaccggttggattggaccggatggactgtggaggatagcagttggtgctgagcttaatggctacggtgctgcacttttgtacaagagtcaagactttctgaattggactagagttgatcacccgctgtattcatccaatgcatcctcaatgtgggagtgcccagattttttcgcggtattgccgggaaatagtggtggacttgacctatctgcagaaatcccaaatggcgccaagcatgtcctcaaaatgagcctagattcctgtgacaagtacatgatcggagtttatgatctgaaaagtgatacctttatgccagatagtgtgttagatgaccgtcgactgtggtcgaggatcgatcatggcaatttctatgcttcaaagtcattcttcgactcgaaaaagggaaggaggatcatatggggttggacaaatgagacagatagctcttcagatgatgttgcaaaaggttgggctggaatccatgcaattcccaggacaatatggttagacagttatggcaagcagttgctgcaatggccaattgaagagatcgagtcccttcgaagaaatgaaatcagccatcaaggactagagctgaagaaaggagacctatttgagattaaaggaactgacacttcgcaggtggtccatgtttttttagggaaactgtagcttatctggcacatcattttcttgaaacaggctgatgtggaggtagattttgagctgacatccattgataatgccgacccttttgatccttcctggcttctggatgtcgagaagcagtgccgagaagcaggtgcatcggttcaaggtggcatagggccatttggacttgttgtcttggcctctgacaacatggaggagcacactgctgtacacttcagagtttacaaatcgcagcaaagctacatgatcctcatgtgttctgatctaagaaggtcttccctgagatcaggaatgtacacaccagcatatggaggcttctttgaatttgaccttcagaaggaaagaaagatatctctgagaactctgattgatcggtcagcggtggagagcttcggaggcggtggcagggtctgcatcatggccagagtttatccggtggtgcttgtcgatgatggcggggcccacatgtacgccttcaacaatggcagtaccacggtcagggtgccacagctcagggcatggagcatgagcagggcagagcacaagtgaatgtaaagttaaagtgatgattaacatagaagagcaaatctaattgacctgtgattggaggactggaaaagtgatttaaatgcttagcacaattgtttcttgataaaaaaaaaa

SEQ ID NO: 23 - DNA, 2059 bp, Festuca arundinacea
ggaaccagccacccacctggccatccatggccgggctccgtctcgccgcggtcgccttccacctctgcctcctgctctctccgtcgtcctccctccgccggctctaccacgaggacgacgaggcagagagcacgccaggccatggcgggagcaggaccgcctaccacttccaacccgccaagaactggcagaacgatccgaatgggccgatgtaccacaacggcttgtaccacttgttctaccagtacaacccacgtggcgccacctggggcaacggcaacctctcctggggccactccgtgtccgtcgacctcgtcaactgggccgccctcgacaccgcccttgaccccgactccccgttcgacgccaacggctgctggtcgggatcagccaccatcctccccgatggacaaccggccattctctacaccggcatcgacgccgctggcaaccaggtccaaaacgtcgccttccccaagaaggcatccgatccactccttcgtgagtgggtgaagcctgactacaaccccgtcattcctctccccaaggacgtcgtgcacgacagcttccgtgacccctccacggcgtggcgcggccgtgacggcctctggcgtgtggccatcgcggccaaggtcaacgtgaccgtgaccgtggggtcaacactgatctaccggagcaaggacttccggcgctgggagaggaacgccgcgccgctgtacgagtctcttgccgccggcatggtggagtgcccggacctgttcccggtggcgaagcccggtgcgcagaacgggctcgactacgcgccctcgagcagggcggcgaggcacgtgctgaagctgagcgtggtggccacgctccaggactactacgtggtggggctgtacgacgacactgcggacaccttcaatgcggccgccggcgccgacaacgactggcggacctggcgccgcatcgactacggccacgtgtacgcgtccaagtccttcttcgacgcgcgaaagaaccggcgcgtgctttggtgctgggccaacgagtctgacaccgaggccgactacatcgccaggggttggtctggcgtccagacggtcccgaggaagatctggctggacatcgatgggaagcagctgctgcagtggccgatcaaggagatagagacgctgaggaagaagcgggtcgggttgctaggaacggagatgaactctggcggcctgaacgaaatcatcggcgtcgcgggctcgcaggcggacgtggaggtcgtcttcaagatcccgaccctggagggggctgagaacattgagcccaatgagctattggacccgcaaaagctatgcggcaacaatggcgcgtcaatgcggggcagtatcggcccgttcggtctactcctcctagcctccggcgacctgctggagcacacctcagtcttcttcagggtgttcaagcacggtgccaagtacaaggttctcatgtgcaccgacctcacaagatcgactacgagatccgacgtgtacaagccgtcgtacggagggttcgtggacatggacatcgacaagaccaagagcatatcgctcagaacattgattgatcactctgtggtggagagcttcggcggtggggggcgaacgtgcatcacggcgcgggtgtacccggagcacgcggagatgagcaacagccacatctatatgttcaacaatgggacaggcgcggtgaaggtagccaagctcgaggcgtgggagctggcgacagccaacgtgaatgtcgcgggccacgggtgataaccccaagtgcaatgaatagtcgtaacacgtttcagtgtggaagtgttagtataaaactgtgggagctactaggttttattctcgaaaactatatatgccacttatataactacttaattaggatatgcttctgcaaaaaaaaatcttcaaaaattggtccaagttaaagttgggggcggtgcccccgacatacacattcctctgcatatgcttgtaacgtgggtagaaaggtcaataagtacgcgggactttgtgattctcgccataggcataaaaaaaaaaaa

SEQ ID NO: 24 - DNA, 2167 bp, Lolium perenne
gggaccttgcgcccaagtacgtagtctgcacagcaatgggggttcgtctcgggagagtagcttgggcgtgcccggcggttctggtgctgctcttgcagctcgccggagcgtcccatgtcgtctacgagaccagcctcctcgagaccgaggcggcggcggccaccgtgccagcctccatttttgagctgagcaccgggtaccacttccggcctcagaagaactggatcaacgatcccaacgcgccgctgtactacaagggttggtaccatctgttcttccagtacaaccccaagggcgcggtgtggggcaacatcgtgtgggcgcactcggtgtcgcgcgacctcatcaactgggtggccctggagacggccctggcgccgagcatcgacgccgacaaatacggctgctggtcggggtcggcgaccatcatgcccgacggcacgccggtgatcatgtacacgggcgtcagccggccggacgtcaactacgaggtccagaacgtcgccttccccaagaacagctcggaccctctcctccgggagtgggtgaagccggcgcacaacccggtgatcgtcccggagggcggcatcaacgcgacgcagttccgggacccgaccacggcctggtacgcggacgggcactggcggatcctggtgggcgccctctccggcgcgtcccgcggcgtggcgtacgtgtaccggagccgcgacttccggcggtggacgcgggtgcggaagccgctgcactcggcgccgacggggatgtgggagtgcccggacttctacccggtgaccgtggacggcaaggagagcggggtggacacgtccgtggtgtccagctcgagggtgaagcacgtgctcaagaacagcctcgacctccgccgctacgactactacaccgtcgggacctacgaccggctgaaggagaggtacgtgccggacaaccccgccggcgacaagcaccacctgaggtacgactacggcaacttctacgcgtccaagacgttctacgacccgtccaagcgccgccgcatcctgtggggatgggcgaacgagtccgacaccgccgtcgacgacgtcgccaagggctgggccggaatccaggcgattcctcggaaggtttggctggacccaagcgggaggcagctgatgcagtggccggtggaggaggtgaaggcgctcagggggaagaagccggtcagcctcaaggaccggatggtgaagcggggagaacacgtcgaggtcaccgggctacaaaccgcacaggctgacgtcgaggtgagcttcgaggtgccgagcctggagggggcggaggcgctggacccggcgctggccaacgacgcccagaagctttgcggcgtgaagggcgccgacgtggagggcggcgtggggcccttcggtctgtgggtgctggcgtcgtccaagctggaggagaggaccgccgtcttcttcagggtgttcaaggccgcgggcaacgtcaacagcaccaagcccctcgtgctcatgtgctccgatccaaccaagtcatctctgaacaagaacctgtaccacccgaccttcgcgggcttcgttgatattgacatggctaagggcaagatttctctcagaagcctgatcgatcaatccgtcgtggagagctttggggccggaggcaggacgtgcatcctctctcgcgtctacccgtcgctcgccattggcaggaacgctcacctccacgtcttcaacaacggcaaggcggacatcaaggtgtcgcggctcacggcgtgggaaatgaagaagccggcgctcatgaacggtgcctagatttagattcaggcaggagcaccatatgcatgattcctacatatgtgcttgaatttggctcaggcatgcgtctggggcgttattctgatgttaatttgacctctggtgaaacatgctagttttacaagggcgcgtacgtagctagctaggtttgcacgctgtgtaagtgaagggggtcattttgtatgcccccgggaataataaagatccatgcatagcctgaggtgggcatcggtagaaagttatttttttgaaacggggcaaaatatttgctccaatcaactactcctggcatggattaaaataaggagcaacaaagtagaagttttacaagaaagttaatgttttgattattaaaaaaaaaa

SEQ ID NO: 25 - DNA, 2138 bp, Lolium perenne
gccctcgcactagtcggccgaggcattcttcctagttgcttccatcgcatcgatctcgatccacagattctatgccaatggaggcaagagatggcgtctcgatgccctactcgtatgcggccctgccggaggacgccgaggcagcggtggttgggcgcggtcgccggaccgggcctctgttcgcagcgttgctgttgacgttggtcgccgcgctccttgccgtcgccgcgctggctggcgtcaggctcgttggcgagctgcctgccgggggcgtcgtcatgcccaaccacccgatggaagtcatggacgtcagcggtagcagagggcctgagtcaggcgtgtcggagaagacgtccggggccgccagcgagagcggcggcatgctgggcgccgacgccggcagcaacgcgttcccgtggagcaatgcgatgctccagtggcagcgcaccggcttccacttccagcccgagaagaactggatgaacgaccccaacggtccggtctactacaaggggtggtaccacctcttctaccagtacaacccggagggcgcaatctggggcaacaagatcgcgtggggccatgccgtgtcccgggacatgctccggtggcgccacctgcccatcgccatgttccccgaccagtggtacgacatcaacggcgcatggtcaggctccgccaccgtgctccccgacggccgcatcgtcatgctctacacgggctccaccaacgcctccgtgcaggtccagtgcctcgccttcccctccgacccctccgacccgctgctcaccaactggaccaagtatgagggcaacccggtgctgtacccgcctccgcacgtcggggagaaggacttccgggacccgaccactgcatggtacgatggctccgatggaatgtggcggatcgtcatcgggtccaaggataaccgccgcgccggcatggccttgacctacaagaccaagaacttccatgattttgagctcgttcccggagtgctgcaccgggtgccggcgacggggatgtgggagtgcatcgatttgtacccggttggcggcgcgaggggcattgacatgacggaggccgttgcggcggcatccaacagcggtggtggtgaagttttgcatgtcatgaaggagagctcagacgacgaccgacatgactactacgcgctagggaggtacgatgcagcgacaaacaagtggacaccgctagatgccgacgccgatgtcggcatcgggctgaggtacgattggggaaagttctacgcatccaagaccttctatgacccggccaagaagaggcgtgtgctatgggggtgggtcggcgagactgactctgagcgcgccgacgtggccaagggatgggcttccctacagtcgatccctcgcacggtggtgctagataccaagacgggcagcaaccttatccagtggccggtggtcgaggtggagacgctccgtaccaactccaccaatctcgggagcatcatcgtcgagcatggctccgtcttccctctcagtctccaccgggccacacagctcgacatcgaggcttccttccgcctggacccgctcgatgtcgccgccgcaaaggaggccgacgttggctacaactgcagcaccagcggtggcgcggccggtcgtggagcgctcggtccctttggcctgctcgtactcgccgatgccaggcgccatggcggggacacggagcagaccgccgtctacttctacgtcgcgaggggcctcgatggcaacctgcgcacgcacttctgccatgacgagtcacggtcatcccgtgccaacgacattgtcaaaagggtcgttggcaacatcgtgccagtgctcgacggaaaggcgctgtctgttagggttttggtggcccactccattgtcgagagcttcgcacagggtgggaggtcggtggtgacttcacgagtttacccgactgaggccatctacgccaatgccggggtataccttttcaacaacgccaccggtgcccgggtccccgccaccagtctcgtcgtccataaaatggacccctcctacaaccagaaccaggccgaaatggcttcattgtaaatcgaaaatgtacatattgttttttgtgctagcatgttgcccgtaaaaaaaaaa

SEQ ID NO: 26 - DNA, 1768 bp, Lolium perenne
ggtccattggcgccacctcccgctcgccatggtgcccgaccaatggtacgacatcaacggtgtctggacaggctccgccaccgtgttccccgatgggaccctgaacatgctctacacggggtccaccaatgcctccgtgcaggcccagtgcctcgccgtgcccgaggaccccaatgactccctcctccgcaactggaccaagcacgaagccaacccggtcctcctcccaccgcccgggatcggtgacaaggacttccgtgacccaaccaccgcatggttcgacgagtctgaccagacgtggcgcaccgtcatcgggtccaaggacaacaacggccacgccggcatcgccatggtgtacaagaccaaagacttcctcaactacgagctcatcccgggatacttgcatcgcgtcgacggcaccggcatgtgggagtgcatcgacttctaccccgtcggcggcaagaacggcagcgaggagctgtacgtgatcaaggagagcagcgacgacgaccgacatgactggtacacgctagggaaatacgacgcggcagccaacacgttcacggccgcggacccggagaacgacctagggattgggctgaggtacgactggggcaagttctacgcgtccaagaccttctacgacccagccaagaagcggcgcgtgctgtgggggtggattggcgagaccgactccgagcgcgccgatgtcgccaagggatgggcatccctcatgtcgattccgaggacggtggagctcgacgagaagacctggaccaacctcatccaatggccagtggaggagatcgagaccctccgcatcaagtccaccgaccttggtggcatcaccattgaccacggcagcgtctacccactccctctccaccgcgccacacagctagacatcgaggcctccttccgcctcgacgccgccaccgtcgccgccctcaacgaggctgacgtaggctacaattgcagcaccagcggcggctctacccaccgcggcgcactcggcccctttggcatcctcgtccttgccgacggtaaggcggagcaaacggcggtgtacttctatgtgtccaagggccttgacggggccctcgagacccacttctgccacgacgagtcgcgatcgacgctggccaaggatgtcgtgaagcgagtggtgggatacaccgtgcctgtcctcgatggtgaggcattttccgtgagggtgctcgtggaccactcaattgtggagagcttcgccatgggtggaaggtccacggcgacgtcgagggtgtacccgacggagtctatctacggcgctgctggtgcatatcttttcaacaatgccaccggcggctccgtgaccgttgagaagctcgtggtgcatgagatggactcgtcctacaaccagatcttcatggctgacgacttgtagtcaccgtcatccatggatagcgtcggatggtgaggatgatcacctactacatatacatacatactattgatcgaacgatccccggatcggtcggtggtggcttcctctttttttggatgcagaaggagatggagtactagctactctatttaccatgttgttgttttgttggttttttggggtttgggtttttgacgagatggatgaattagctatagatggatgattgtgtcctatttttctcctgccttccgagtgtaactacatatattggcaggatcgatgatatccctgttgcatgacagtgatgattaattattgtgatgatattgatcaaaaaaaaaa

SEQ ID NO: 27 - DNA, 1855 bp, Lolium perenne
ggatcttccggtccaggctcccggacatcgacatccctacccacatgcccctgcacgactactgcttcgcgacggcagcctcggccccggacgcgccgtgcctcattaccgcagccacggggcggacctacacgttcgccgagacgcacctgctctgccgcaaggccgcggcggcgctgcacgggctcggcgtgcgccacggggaccggatcatggtgctgctgcagaactccgtggagttcgcgctcgccttcttcggcgcgtccatgctcggggccgtcagcacggcggcgaacccgttctgcacgccgcaggagatccacaagcagctcgtggcctccggcgcgaagctggtcgtcacgcagtccgcctacgtcgacaagctccggcacgaggccttcccacgaatcggcgaggccctgaccgtgatcaccatcgacgacgacggcaccccggacggctgccagccgttctggggcctcgtgtcagccgccgacgagaacagcgtcccggagtctcccatctcgccggacgacgcggtggcgctgccctactcgtcgggcacgacggggctgcccaagggcgtggtgctgacgcacgggggcctggtgtcgagcgtggcgcagcaggtggacggcgagaacccgaacctgcacatgcgggcgggggaggacgtggtgctctgcgtgctgccgctcttccacatcttctcgctcaactcggtgctgctgtgcgcgctgcgggcgggcgccgccgtgatgctgatgcctaggttcgagatgggggccatgctggagggcatcgagcggtggcgcgtcacggtggcggccgtggtgccgccgctggtgctcgcgctcgccaagaaccccggggtggagaagcacgacctcagctccattcggatcgtgctctccggcgccgcgccgctcggcaaggagctcgaggacgcgctacgtggccgcctgccgcaggccatcttcggacagggctacgggatgacggaggccgggccggtgctgtccatgtgcccggcgttcgcgcgggagccgacgccggccaagtccggctcctgcggcacggtggtgcgcaacgccgagctcaaggtggtcgaccccgacaccggcgtctccctcggccgcaacctccccggcgagatctgcatccgcggcccgcagatcatgaaaggatacttgaatgatcccgtggccaccgccgcgaccatcgacgtcgagggatggctccacaccggcgacatcggctacgtcgacgacgacgacgaggtcttcatcgtcgaccgcgtcaaggagctcatcaagttcaagggcttccaggtaccgccggccgagctcgaggctctgctcatcgcgcacccgtccatcgccgacgcggccgtcgtcccgcaaaaggatgatgccgccggcgaggtcccggtcgccttcgtggtccgcgccgccgactccgacatcgccgaggaggccatcaaggagttcgtatccaagcaggtggtgttctacaagaggctgcacaaggtctacttcacccacgcgatccccaagtcggcgtcggggaagatactcaggaaagaactcagagctaaactcgccgccccggccactgcctgaagagtggttcaaggcttcatgctaatcatttcgatcagaaaggcagttcctatgttccaccttttgtttcatttggaagattgtattccagctagtggccagtgactgagtaagggatggggataaaagttttgtctacgttttcttttacgctactctctccattgaggagtacaatgtatcaggggattcgtgattgaaattaatcaagattggttcaattaaaaaaaaaa

SEQ ID NO: 28 - DNA, 2041 bp, Lolium perenne
gaggaggtggtggaggagcacgaaatcccggccgccattcctccaccttccgctccgaccaaagatttccatccggcgagatccatgggctccatcgcggcagacttggcgccggaggcgcccgcggagctggtgttccggtcgaagctcccggacatcgagatcccgacccacctgacgctgcaagactactgcttcgagcgcctgccggagctctccgcccgcgcctgcctcatcgacggcgccacgggcgccgcgctcacctacggcgaggtggacgccctctcgcgccgctgcgcggccgggctgcgccgcctcggcgtccgcaagggcgacgtggtcatggcgctcctccgcaactgccccgagttcgccttcgtgttcctcggcgcggcccggctcggcgccgccaccaccaccgccaacccgttctacacgccccacgagatccaccgccaggccgccgcggccggcgccaaggtgatcgtcaccgaggcctgcgccgtcgagaaggtgcgcgccttcgccgccgagagagggatccccgtcgtctccgtcgacgaggccgtcgacgacggctgcctcccgttcgccgcgactctcctcggggaagaaagcggcgagcggttcgtcgacgaggcggtcgaccccgacgacgtggtggcgctgccgtactcgtccggcaccaccggcctgcccaagggcgtcatgctcacccaccgcagcctcgtcaccagcgtcgcccagcaggtggacggtgagaacccgaacctgcacttcagctcgtccgacgtgctgctgtgcgtgctgccgctgttccacatctactcgctcaactcggtgctgctcgccggtttacgcgccgggtgcgcgatcgtgatcatgcgcaagttcgaccacggcgctttggtggacctggtgcgcgcgcacggcgtcacggtggcgccattcgtgccgcccatcgtggtggagatcgccaagagcgcgcgggtgaccgccgcggacctggcgtcgatccggctggtcatgtcgggggcggcgcccatgggcaaggagctgcaggacgcgttcatggccaagatccccaacgctgtgctcgggcagggatatgggatgaccgaggccggccccgtgctagccatgtgcctggccttcgccaaggagccgttcgaggtcaagtctggctcctgcggcaccgtcgtccggaacgccgagctcaagatcgtcgaccccgacaccggcgcctccctcggccgcaacctgccgggggagatctgcatccgcggcaagcagatcatgaaaggttacctaaatgatccggaggccacaaagaacaccattgacaaggacggttggctgcatactggagacattggttatgtcgatgatgacgacgagatctttattgtcgacagactgaaggagataatcaaatataagggattccaagtacctccagcagaacttgaagcccttctcattacgcaccctgaaatcaaggatgctgctgtcgtatcgatgcaagacgaacttgctggtgaagttccggttgcgtttgttgtgcggactgaaggttcagagatcagcgaaaacgagatcaagcagttcgttgcaaaagaggttgttttctacaagaggatctgcaaagtgttcttcgcggattccattccaaagagtccatctggcaagatcctcaggaaggacctgagagcaaagctcgccgcaggcattcccggcagtgataccacacagtccaaaaactaagtcagatatattgtttcccaaccgtacacacctctgtccaacaccatgtaatgttcttaatataaacggaaattattacatatagaagggctgattctttttactagatgtgtccaacatatgatatgtttgttaggccgatgatgggtaacctgtcatgtatagataaccgcctttttttgataagaaaggctgattataatgtataccatgagctgaatatttgttcaagaagatcaggattcggttgccaattgtttaccttttaaaaaaaaaa

SEQ ID NO: 29 - DNA, 1934 bp, Festuca arundinacea
gggagcacggaatcccggccgccattcctccaccttcagctccggccaaagatttccatccggcgagatccatgggctccatcgcggcggacgcgccggaggcgcctcccgccgagctggtgttccggtccaagctcccggacatcgagatcccgacccacctgacgctgcaggactactgcttccagcgcctgccggagcactccgcgcgcgcctgcctcatcgacggcgccaccggcgccgcgctcacctacggcgaggtggacgcgctctcccgccgttgcgcggccggcctccgccgcctgggggtccgcaagggcgacgtcgtcatggcgctgctccgcaactgcccggagttcgccttcgtgttcctcggcgccgcccggctcggcgccgccaccaccaccgccaacccgttctacacgccccacgagatccaccgccaggccaccgccgccggcgccaaggtgatcgtcaccgaggcctgcgccgtcgagaaggtgcgcgcgttcgccgccgagagagggataaccgtcgtctccgtcgacgagggcgtcgacgacggctgcctcccgttcggcgagactctgctcggggaagacggcggcgagcggttcgtcgacgaggcggtcgacccggacgacgtggtggcgctgccgtactcgtccggcaccaccggcctccccaagggcgtcatgctcacccaccgcagcctcgtcaccagcgtcgcccagcaggtggacggtgagaacccgaatctgcacttcagctcgtcggacgtgctgctgtgcgtgctgccgctgttccacatctactctctcaactcggtgctgctggcggggctccgcgcgggttgcgcgatcgtgatcatgcgcaagttcgaccacggtgcgctggtggacctggtgcgcgcgcacggcgtcaccgtggcgccattcgtgccgcccatcgtggtggagatcgccaagagcgcgcgggtgacggcggcggacctggcgtccatccggctggtcatgtcgggggcggcgcccatgggcaaggagctgcaggacgcgttcatggccaagatccccaacgccgtgctcgggcagggatatgggatgaccgaggccggccccgtgctggccatgtgcctggccttcgccaaggagccgttcgaggtcaagtccggctcctgcggcaccgtcgtccggaacgccgagctcaagatcgtcgaccccgacaccggcgcctccctcggccgcaacctgcccggggagatctgcatccgcggcaagcagatcatgaaaggttacctaaatgatccggaggccacaaagaacaccattgacaaggacggttggctgcatactggagacattggttatgtcgatgatgacgacgagatctttattgtcgacagactgaaggagataatcaaatataagggattccaagtacctccggcagaacttgaagcccttctcattacgcaccctgaaatcaaggatgctgctgtcgtatcgatgcaagacgaacttgctggtgaagttccggttgcgtttgttgtgcggactgaaggttcagagatcagcgaaaacgagatcaagcagttcgttgcaaaagaggttgttttctacaagaggatctgcaaagtgttcttcgcggactccattccgaagagtccttctggtaagatccttaggaaggacctgagagcaaagctcgccgcaggcatccccggcagtgaaaccacacagtccaaaagctaagtcagatatattgtttcccaaccttacacacctctgtccaacatcatgtaatgttcttaatataaatggaaattaatacatatagaagggctgattctttttactagatgtccattgatatatttttagtccgatgatgtgtaccctgtcatgtatagataccgcctttattgaaaaaaaaaa

SEQ ID NO: 30 - DNA, 2014 bp, Lolium perenne
ggagagaggagatcaagcaagccatctcccacgactaatttagaagaagatttacttagtctctgcttctcgctcgatcgccggccggtgaggtagctagctagctactcgtactagatcattaccatgggttccgtgccggaggagtcagtggtgtccgtggccgcggcggagacggtgttccggtcgaagctccccgacatcgagatcaacaacgagcagacgctgcagagctactgcttcgagaagatggccgaggtcgcgtcccgcccctgcatcatcgacggccagacgggcgcctcctacacctacacggaggtcgactacctgacccgtcgcgccgcggcggggctgcgccgcatgggcgtggggaagggcgacgtggtgatgaacctgctccgcaactgccccgagttcgccttctccttcctgggcgcggccaggctgggcgccgccaccaccaccgccaacccgttctacaccccgcacgagatccaccgccaggcggaggcggcgggcgccaagctgatcgtcaccgaggcctgcgccgtggagaaggtgctggagttcgcggcggggcggggcctgcccgtggtcaccgtcgacgggaggcgcgacgggtgcgtggacttcgcggagctgatcgccggcgaggagctgcccgaggcggacgaggccgggatcctccccgacgacgtcgtcgccctgccctactcctccggcaccaccgggctccccaagggcgtcatgctcacccaccgcagcctcgtcaccagcgtcgcccagctggttgacgggtcgaacccaaacgtgtgcttcaacaaggacgacgcgctgctgtgcctgctgccgctgttccacatctactcgctgcacacggtgctgctggcggggctccgcgtcggcgccgccatcgtcatcatgcgcaagttcgacgtcggcgcgctggtggacctcgtccgcgcgcaccgcatcaccatcgcgccattcgtgccgcccatcgtcgtggagatcgccaagagcgaccgcgtcggcgccgacgacctcgcatccatccgcatggtgctctccggcgccgcgcccatgggcaaggacctccaggacgccttcatggccaagatccccaacgccgtgctcggacagggttacgggatgactgaggccgggccggtgctggccatgtgcctggcgttcgccaaggagcccttcaaggtcaagtccgggtcgtgcggcaccgtggtgcgcaacgcagagctcaaggtcgtcgaccccgacaccggcgcatccctcggcaggaaccagcccggcgagatctgcgtccgcgggaagcagatcatgataggttacctgaacgacccagagtctaccaagaacaccatcgacaaggacggctggctgcacaccggagatatcggcttggtggacgacgacgacgagatcttcatcgtcgacaggctcaaggagatcatcaagtacaagggcttccaggtggcgccggcggagctcgaggccctcctcctcacgaacccggaggtcaaggacgccgccgtcgtaggggtgaaggatgatctctgcggcgaagtcccggtcgccttcattaagaggatcgaaggatctgagatcaccgagaacgagatcaagcaattcgtctcaaaggaggttgttttctacaagaggatcaacaaggtctacttcaccgactccattcccaagaacccttccggcaagatcgtaaggaaggacttgagagccaggctcgccgctggcatccccaccgaagttgccgcgccgagaagctaagggccgcttctcaggaacgcaatcacccatggtgctgtttaggtgctgttatagaccacaccaaatggggaaagaaactacgggaggggatcatattattcttgcaggagatatcagtttgttgattcgccctgcttgtgtaatgttgataaaatgaaatgatagaatagatgtgttgttttattttttgaccatgtaaaaaaaaaaaaaaaaa

SEQ ID NO: 31 - DNA, 2073 bp, Festuca arundinacea
gagcaagcgcgcgcacgcactcgcaccatctcccacgactaatttaaccaccttacaagaagatttccttagtctccgtttctctctcgatcgccggccggtgaggtagctagctagctactcgtagatcattaccatggggtctgtgccggaggagtcagtggtagccgcggccgtggcggagacggtgttccggtcgaagctccctgacatcgagatcaacaacgagcagacgctgcagagctactgcttcgagaagatggccgaggtcgcatcccgcccctgcatcatcgacgggcagacgggcgcctcctacacctacacagaggtggagtccctgacccgtcgcgccgcggcggggctccggcgcatgggcgtggggaagggcgacgtggtgatgaacctgctccgcaactgccccgagttcgccttctccttcctgggcgcggcgcggctcggcgccgccaccaccaccgccaacccgttctacaccccgcacgagatccaccgccaggcggaggcggcgggcgccaaggtgatcgtcacggaggcctgcgccgtggagaaggtgctggagttcgcggcggagcggggactgcccgtggtgaccgtcgacgggaagcgcgacgggtgcgtcgacttcgcggagctgatcgccggcgaggagctgcccgaggcggaggaggccgggatcctccccgacgacgtcgtggccctgccgtactcgtccggcaccaccgggctccccaagggcgtcatgctcacccaccgcagcctcgtcaccagcgtcgcccagctgtttgacgggtcgaacccgaacgtgtgcttcaacaaggacgacgcgctgctgtgcctgctgccgctcttccacatctactcgctgcacacggtgctgctggcggggctccgcgtcggggccgccatcgtcatcatgcgcaagttcgacgtcggcgcgctggtggacctcgtccgcgcgcaccgcatcaccatcgcgccattcgtgcccccgatcgtggtggagatcgccaagagcgaccgcgtcaccgccgacgacctcacatccatccgcatggtgctctccggcgccgcgcccatgggcaaggacctccaggacgcgttcatggccaagatccccaacgccgtgctcggacagggttacgggatgactgaggccggtccggtgctggccatgtgcctggcgttcgccaaggagcccttcaaggtcaagtccgggtcctgcggcaccgtggtgcgcaacgccgagctcaaggtcgtcgaccccgacaccggcgcatccctcggccggaaccagcctggcgagatctgcgtccgcgggaagcagatcatgataggttacctgaacgacccagagtcgaccaagaacaccatcgacaaggacggctggctgcacaccggagacatcggcttggtggatgacgacgacgagatcttcatcgtcgacaggctcaaggagatcatcaagtacaagggcttccaggtggcgccggcggagctcgaggccctcctcctcacgaacccggaggtcaaggacgccgccgtcgtaggggtgaaggatgatctctgcggcgaagtcccggtcgccttcattaagaggatcgaaggatctgagatcaccgagaacgacatcaagcaattcgtctcaaaggaggttgttttctacaagaggatcaacaaggtctacttcaccgactccattcccaagaacccttccggcaagatcctaaggaaggacttgagagccaggctcgccgctggcatccccaccgaggttgccgcgccaagaagctaagggccgctcctcaggaacgcagtcacccatggtgctgttatagaccacaccaaatggggaaagaaactacgggagggtacatgatcagattattcttgcaggagatatcagtttgttggttcgccctgcttgtgtaatgttgataaaatgaaatgatataatagatgtgttgttttatttttttgaccatgtaagaacaaggctgggattttactcccaaacaaacaaaaagaacaaggctgggatttttttcaaaaaaaaaa

SEQ ID NO: 32 - DNA, 1798 bp, Lolium perenne
gctcaacactcgccaatcccacagccacagaagccacctaccaccgctccaccgatcgacgatggaggtcctcctcctggagaaggccctactggggctcttcgcggcggcggtgctggccatcgccgtcgcgaagctcgccggcaagcgcttccgcctcccgcccggcccctccggcgcccccatcgtcggcaactggctccaggtcggcgacgacctgaaccaccgcaacctgatgggcatcgcgaagcggttcggggaggtgttcctgctccgcatgggcatccgcaacctggtggtggtgtccagcccggagctggccaaggaggtgctccacacgcagggcgtggagttcggctcccgcacccgcaacgtcgtcttcgacatcttcaccggcaacggccaggacatggtcttcaccgtctacggcgaccactggcgcaagatgcgccggatcatgaccgtccccttcttcaccaacaaggtggtggcgcagaaccgggtgggctgggaggaggaggccaggctcgtggtggaggacgtcaaggccgacccggcgttcgcgaccgccggcaccgtgatccgccgtaggctgcagctcatgatgtacaacgacatgttccgcatcatgttcgaccgcaggttcgagtccgtcgacgacccgctcttcaacaagctcaaggccatgaacgccgagcgcagcatcctgtcgcagagcttcgactacaactacggcgacttcatccccattctccgaccgttcctccgcaagtacctcaaccggtgcacaaacctcacgaccaagaggatgaagctcttcgaggaccacttcgtcgctgacagaaagaaggcgctggagcagaatggggagatcaggtgcgccatggaccacatcctggaggcggagaggaagggcgagatcaaccacgacaacgtcctctacatcgtcgagaacatcaacgttgcagccatcgagacaacgctgtggtcgatcgagtggggcatcgcggagctggtgaaccacccggacgtccagtcgaagctccgcgacgagatgaccgccgtgctgggcgccgacgtggcggtgacggagccggacctggagcgcctcccctacctgcagtccgtcgtgaaggagaccctccgcctccgcatggccatcccgctgctcgtgccgcacatgaatctcagcgacgccaagctcgccggctacgacatccccgccgagtccaagatcctcgtcaacgcatggttcctcgccaacgaccccaagcggtgggtgcgcgccgacgagttcaggcccgagcgcttcctggaggaggagaaggccgtcgaggcccacggcaacgacttccgcttcgtgcccttcggcgtcggccgccggagctgccccgggatcgtcctcgcgctgcccatcatcggcatcacgctcggacgcctcgtgcagaacttccagctgctgccgccgcccgggcaggacaagatcgataccaccgagaagcccggacagttcagcaaccagatcctcaagcacgccaccgtcgtctgcaagccgctcgaggcctagaattttctatttgatcgtatggaggcttctgacatgcgtgtctgtgcatgcatgcgtgaacgctggtgccgggagatcgatctatgcacgcatgtgatgtgtattttcctttttttgtgcttttattttacttagttgcatttttgttggtcttcatgtaaggcgtcatgttgtagatttgctatgttggtgataatgatgtaaaacttcttcaaaaaaaaaaaaaaaaaa

SEQ ID NO: 33 - DNA, 1775 bp, Festuca arundinacea
gcaacaaccgttactgagcgcgcgaaaacgcacgagagagagagtgaagcggcgcgtgtattcttcactggccgtcgccatggatttcgtcttcgtggagaagctcctcgtcgggctcctagcgtccgtggtggtcgcgatcgtcgtgtccaagatccgcggccgcaaactgaggctgccgccgggccccatccccgtgcccatcttcggcaactggctgcaggtcggggacgacctgaaccaccgcaacctggcggcgatggcccgcaagttcggggaggtgttcctcctccgcatgggcatccgcaacctggtggtggtgtcgagcccggagctggccaaggaggtgctccacacgcagggcgtggagttcgggtcccgcacacgcaacgtcgtcttcgacatcttcaccggcaaggggcaggacatggtgttcacggtgtacggcgaccactggcgcaagatgcggcggatcatgacggtgcccttcttcacgaacaaggtggtgcagcagtaccgggccgggtgggaggcggaggcggccttcgttgtggacaacgtgcgcgccgaccccaaggccgccaccgacggcgtggtgctccgccgccacctgcagctgatgatgtacaacaacatgtaccgcatcatgttcgaccggcggttcgagagcatggacgacccgctcttcctccgcctcagggcgctcaacggcgagcgcagccgcctggcgcagagcttcgagtacaactacggcgacttcatccccgttctccgccccttcctccgcggctacctcgggctctgcgaacaggtcaaggagacccgcctcaagctcttcaaggattacttcctggacgagaggaagaagctggcgagcacaaagtccatggacaccaacggcctcaagtgcgccattgatcacatcctggaggcgcaggagaagggagagatcaacgaggacaacgtcctctacatcatcgagaacatcaacgtcgccgcgatcgagacgacgctgtggtcgatcgagtgggggatcgcggagctggtgaaccacccggagatccagcagaagctgcgcgacgagatggacgcggtgctgggcgccggccaccagatcacggagcccgacacgcacaagctcccctacctgcaagccgtgatcaaggagacgctgcggctgcgcatggctatcccgctgctggtgccgcacatgaaccttcacgacgccaagctcgccggctacaacatccccgccgagagcaagatcctcgtcaacgcctggttcctcgccaacaacccggagcagtggaagaggcccgacgagttccgccccgagcgcttcctggaggaggagaagcacgtcgaggccagcggcaacgacttcaggttcctgcccttcggcgtcggccgccggagctgcccggggatcatcctcgcgctgcccatcctcggcatcaccatcggccgcctcgtgcagaacttcgagctcaccacgccgccgggggtggacaagctcgacaccaccgagaagggtggccagttcagcctccacatcttgaaccactccaccatcgtcgccaagcccagagtgttctgagttctgagttgcgtgcagcttctggtttgatgctgtactctcttgcgtgcatgtttgctcgtcctaaaaccttaattatgtatgtctactacagagtagatacaagtttcgtatgttatctgcaagaaacagaggatatatatgaacttttttaaaaaacagtaaaaaaaaaaaaaaa

SEQ ID NO: 34 - DNA, 1323 bp, Lolium perenne
tcctctcgccgacgcgctcagagccaagagcatgggcatcgtcaacgcctccgagaagacgatcaccggctgggccgccagggacgccaccggccacctctccccgtacacgtacaacctcaggaggacgggcgctgaagatgtggtgctgaaggttctgtactgcggcatctgccacactgacctccaccagaccaagaaccaccttggtgctccaaaataccccatggttcccgggcatgaggtggtaggcgaggtggtggaggtcgggccggaggtgagcaagtacagcgtcggcgatgtggtcggcgtgggggtgatcgttgggtgctgccgcgactgccggccgtgcaaggccaacgttgagcagtactgcaacaagaagatctggtcgtacaacgacgtctacaccgacggaaagcccacgcagggcggcttcgcctcctccatggtcgtcgaccagaagttcgtggtgaagatcccagcggggctagcgccggagcaggcggcgccgctgctgtgcgctggcgtcacggtgtacagcccgctgaagcacttcgggctgatgaccccgggcctccgcggcggcatcctcggcctgggcggcgtgggccacatgggcgtgaaggtggccaagtccatgggccaccacgtcaccgtgatcagctcctccgacaagaagcgcgccgaggccatggacgacctgggcgccgacgcctacctcgtcagctccgacgaggcccagatggccgccgccatggactcgctggactacatcatcgacaccgtgcccgtcaagcacccgctcgagccctacctcgcgctgctcaagatggacggcaagctcgtcctcatgggcgtcattggcgagccgctcagcttcgtgtcccccatggtcatgctcgggaggaagaccatcacgggcagcttcatcgggagcatcgaggagaccgaggaggtgctcaggttctgcgtcgacaagggcctcacctcgcagatcgaggtcgtcaagatggactacctcaaccaggcgcttgagaggctcgagcgcaacgacgtcaggtaccgcttcgtcgtcgacgtcgcagggagcaacatcgacgacactgccgcatgatcaacttggcaacgacgagcgaacctccattgagcgcgacaatttccgtgacatatactcctcaacttggttcaatacatgattgtgaactgtgtgaatgtgtttccgtcttctatcagagattcagagtgtgcatgttagtttcaataggaagaaatgtttggtatgagtccggcctaataataacggatttgctaaaaaaaaaa

SEQ ID NO: 35 - DNA, 1313 bp, Festuca arundinacea
ggtcccaagcccacccaatcctcaccagcatctctctcgcccacgcctccgatctcctctcgccgccgcgctcagtgccaagagaatgggcagcgtcgacgcctccgagaagacgatcaccgggtgggccgccagggacaccaccggtcacctctccccctacacgtacaccctcaggaggacgggcgctgaagatgtggtgctgaaggttctgtactgcggcatctgccacactgacctccaccagaccaagaaccaccttggtgcctcaaaataccccatggttcccgggcatgaggtggtaggcgaggtggtggaggtcgggccggaggtgagcaagtacagcgtcggcgacgtggttggcgtcggggtgatcgtcgggtgctgccacgactgccggccgtgcaaggccaacgttgagcagtactgcaacaagaagatctggtcgtacaacgacgtctacaccgacggcaagccaacgcagggcggcttcgcctccgccatggtcgtcgaccagaagttcgcggtgaagatcccggcggggctggcgccggagcaggcggcgccgctgctctgcgcgggggtgacggtgtacagcccactgaagcactttgggctgatgaccccaggcctccgcggcggcatcctgggcctcggcggcgtgggccacatgggcgtgaaggtggccaagtccatgggccaccacgtcaccgtgatcagctcctccaacaagaagcgcgccgaggccatggacgacctcggcgccgacgcctacctcgtcagctccgacgaggcccagatggccgccgccatggactcgctcgactacatcatcgacaccgtgcccgtcaagcacccgctcgagccctacctcgcgctgctgaagatggacggcaagctcgtcctcatgggcgtgatcgccgagccgctcagcttcgtgtcccccatggtcatgctcgggaggaagaccatcacggggagcttcatcggcagcatcgaggagaccgaggaggtgctcaggttctgcgtcgaaaagggcctcacctcgcagatcgaggtcgtcaagatggactacctcaaccacgcccttgagaggctcgagcgcaacgacgtcaggtaccgcttcgtcgtcgacgtcgctgggagcaacatcaaggacgccgacgcctgatcgacttggaacctactccaagatagagcgcgataatttccgtgacatatgctcctcaactcggtgcagtacatgattgtgacctgtgtgtgaatttgtttccgtcttctatcagagtgcgtgctagtttccatggaaaaaa

SEQ ID NO: 36 - DNA, 1059 bp, Lolium perenne
gcaatcatccagcccagatctcacgcgtttccttcctccagctaaagaccggcaatggcgaccacggcggctgatgccacggccacggttgccaaggagcagaccaccaccaacggcgccgccagcggtgccgagcaggtcacccgccactccgaggtcgggcacaagagcctgctccagagcgacgcgctctaccagtacatcctggagaccaccgtgtacccgcgcgagcacgagtgcatgaagcagctccgcgaggacaccgccaaccacccatggaacctgatgaccacgtcggcggacgagggccagttcctcaacctgctcatcaagctcatcggcgccaagaagaccatggagatcggcgtctacaccggctactccctcctcgccaccgcgctcgccatccccgaggacggcacgatcttggccatggacatcaaccgcgagaactacgagaccatcggcaagccgtgcatcgagaaggccggcgtcgcgcacaagatcgacttccgcgaggggcccgcgctcccggtgctcgacgagctgctcgaggacgaggccaaccacggcaccttcgacttcgtcttcgtcgacgccgacaaggacaactacctcaactaccaccagcgcctcatgaagctcgtcagggtcggcggccttctcggctacgacaacacgctctggaacggatccgtcgtgctccccgccgacgcgcccatgcgcaagtacatccgctactaccgcgacttcgtcctcgagcttaacaaggccctcgccgcagacgaccgcgtcgagatctgccagctccccgtcggcgacggcatcaccctctgccgccgcgccaagtgattgtctgattgatgacgcgagcgcgccgccccctcggctccgctccgctccatggatgcggacaagaattgattaattattattccccattttgccgttctggctttcttctgtatcttcttggaaacaaatattgtccctttatgtacgtatatcaaatttatatccagacaaataatattactcctataaaaaaaaaaaaaaaaa

SEQ ID NO: 37 - DNA, 1063 bp, Festuca arundinacea
ggtcgactcagcaagacagcccaatcatccagcccagatctcgcgcgtttccttcctccagctaaagaccggcaatggcgaccacggcggctgatgccacggccacggtgcccaaggagcagcccgccaccaacggcgccgccagcggtgccgagcaggtcacccgccactccgaggtcggccacaagagcctgctccagagcgacgcgctctaccagtacatcctggagaccaccgtgtacccgcgcgagcacgagtgcatgaagcagctccgcgaggacaccgccaaccacccatggaacctgatgaccacgtcggcggacgagggccagttcctcaacctgctcatcaagctcatcggcgcaaagaagaccatggagatcggcgtctacaccggctactccctcctcgccaccgcgctcgccatcccagaagacggcacgatcttggccatggacatcaaccgcgagaactacgagaccatcggcaagccgtgcatcgagaaggccggcgtggcgcacaagatcgacttccgcgaggggcccgcgctcccggtcctggacgagctgctcgaggacgaggccaaccacggctccttcgacttcgtcttcgtcgacgccgacaaggacaactacctcaactaccaccagcgcctcatgaagctcgtcagggtcggcggcctcatcggctacgacaacacgctctggaacggatccgtagtgctccccgccgacgcgcccatgcgcaagtacatccgctactaccgcgacttcgtcctcgagctcaacaaggccctcgccgcagacgaccgcgtcgagatctgccagctccccgtcggcgacggcatcaccctctgccgccgcgccaagtgattgtctgattgatgacgctcgcgcgccgccccctctgctccgctccatggatgcggacaagaattaattaattattccccattttgcctttcttgctttcttctgtatcttcttggaaacaaatattgtccttttatgtacgtatacaaatttatatccagacaaataatattactcctataaaaaaaaaa

SEQ ID NO: 38 - DNA, 1333 bp, Lolium perenne
ggacgaatcctaccaaaccgagctaccagatccttctctactaatcgagctccctccgcctgtcctcgaccccgcctcaccgccggccggttctccgctccgagctatacgtccgtccgagaacacccgtcccatattaactatcaacatgacagtcgtcgaggtcttagctgccggcgacgccgccgccgccgcggtggcgcggcccgccgggaacgggcagaccgtgtgtgtgaccggcgccgccgggtacatcgcgtcctggctcgtcaagctgctgctggagaaggggtacactgtcaagggcaccgtcaggaacccagacgacccgaagaacgcgcacctgagggcgctcgacggcgccgccgaccggctggtcctctgcaaggccgacctcctcgactacgacgccatccgccgcgccatcgacggctgccacggcgtcttccacaccgcatccccagtcactgacgaccccgagcaaatggtggagccggcggtgaggggcacgcagtacgtcatagacgcggcggcggaggccggcacggtgcggcggatggtgctcacctcctccatcggcgccgtcaccatgcaccccaaccgcgggccggacgtggtcgtcgacgagtcgtgctggagcgacctcgacttctgcaagaaaaccaggaactggtactgctacgggaaggcggttgcggagcaggcggcatcggagttggcgcggcagcgcggcgtggaccttgtggtggtgaacccggtgctggtgatcggccccctgctgcagccgacggtgaacgcaagcatcggccacatcctcaagtacctggacgggtcggccagcaagttcgccaacgccgtgcaggcgtacgtggacgtccgcgacgtggccgacgcccacctccgcgtcttcgagtgcgccgccgcgtccggccgccacctctgcgccgagcgcgtcctccaccgcgaggacgtcgtgcgcatcctcgccaagctcttccccgagtaccccgtccccacaaggtgctccgacgaggcgaacccgaggaagcagccatacaagatgtctaaccagaagctccaggacctcggactcgagttcaggccggtgagccagtccctgtacgagacggtgaagagcctccaggagaagggccaccttccggtgctcagcgagcaggcagaggcggacaaggaaaccctggctgcagagctgcaggcaggggttaccatccgagcatgaggaacaagaaatcaaccatgtccatactgctactgtcatgtaaaccaggcagtgtctgttgaatgcctaatctaagttcttgtaaaaaaaaaa

SEQ ID NO: 39 - DNA, 1237 bp, Festuca arundinacea
gcaagagctagttcttctgtccatccgtagctcttccctttcaccaacaagctagtttagacaagtacagtggtactgtaagagcaacaatgaccgttgtcgacgccgccgcgccgcagctgcctggccatgggcagaccgtgtgcgtcaccggcgccgcggggtacatcgcgtcggggctcgtcaagctgctcctggagagaggctacaccgtgaagggcacagtgaggaacccagatgatcccaagaacgcccacctgaaggcgctggacggcgccaccgagaggctgatcctctgcaaagccgacctcctcgactacgacgccatatgcgccgccgtcgagggctgccacggcgtgttccacaccgcctctccagtcaccgatgatcctgagcagatggtggagccggcggtgcggggcacggagtacgtgatcaacgcggcagcggatgcgggaacggtgcgccgggtggtgttcacgtcgtcaatcggtgccatcaccatggaccccaaccgcggtcctgacgtagtcgtcaatgagtcctgctggagcgacctcgaattctgcaagaaaaccaagaactggtactgctacggcaaggccgtggcggagcaggctgcgtgggaggcggccaggaagcgcggcatcgacctcgtcgtcgtgaaccctgtgctcgtggtagggccgctgctgcaaccaacggtgaacgctagcgccgcacacatcctcaagtacctcgacggctcggccaagaagtacgccaacgctgtgcagtcatacgtagacgtgcgtgacgtagccggcgcgcacatccgggtgttcgaggcgcctgaggcgtcgggccggtacctctgcgccgagcgcgtgctgcaccgtggggacgttgtccaaatcctcagcaaactcttccctgagtaccctgtgccaacaaggtgctctgatgaagtgaacccacggaagcagccttataagatgtccaaccaaaagctgcaggatcttggcctccagttcactcctgtgaacgactctctgtatgagaccgtaaagagcctccaggagaagggacatctcctagtaccaagcaaaccagagggattaaacggtgtaacggcatgatactgctaaaaaagcagcagagttcacgtgctcctgtaacatggtcaaacatgagttgtttttctgtataaattctatccagtatcgtgttatttaagtgaactaagagaaaaaaaaaa

SEQ ID NO: 40 - DNA, 1429 bp, Festuca arundinacea
gctctcgatcggcagacgcagagatcgatgggttccaccgccgccgacatggccgcgtccgccgaccaggaggcgtgcatgttcgccctccagctcgcctcctcgtcgatcctcccgatgacgctgaagaacgccatcgagcttggcctcctggagatcctggtggccgccggcggcaagtcgctgacccccaccgaggtggccgccaagctcccgtccgcggcgaacccggaagcgccggacatggtggaccgcatgctccggctgctcgcgtcgtacaacgtcgtgacgtgcctggtagaggagggcaaggacgggcgcctctcccggagctacggcgccgcgcccgtgtgcaagttcctcacccccaacgaggacggcgtctccatggcggcgctcgcgctcatgaaccaggacaaggtcctcatggagagctggtactacctcaaggacgcggtccttgacggcggcatccccttcaacaaggcgtacggcatgtcggcgttcgagtaccacggcacggacccgcgcttcaaccgcgttttcaacgaagggatgaagaaccactccatcatcatcaccaagaagctcctcgagctctaccacggcttccagggcctcggcaccctcgtcgacgtcggcggcggcgtcggcgccaccgtggccgccatcgccgcccactaccccgccatcaagggggtcaacttcgacctcccccacgtcatctccgaggcgccgcagttcccgggcgtcacccacgtcggcggcgacatgttcaaggaggtgccctcgggcgacgccatcctcatgaagtggatcctccacgactggagcgaccagcactgcgccacgctgctcaagaactgctacgacgcgctgccggcgcacggcaaggtcgtgctcgtcgagtgcatcctgccggtcaacccggaggccaagcccagctcgcagggggtcttccacgtcgacatgatcatgctcgcgcacaaccccggcggcagggagaggtacgagagggagttcgaggccctggccaggggagctgggttcaccggcgtcaagtccacgtacatctacgcaaacgcgtgggccatcgagttcaccaagtagatgagatccctccggcctccatgcatccaggcaacctccccccgatatgagaacgatcgtcgtcgattttgctggctgctgcctttgctcctgcatcgatttgcaaacggaccctttggttggtttttcctctgttttccctaattttttcatgctctgaattttgaattttgatggctgggtcgtcgatctgctcggaaatgttttgaaaaggttgggtatgttggaaacttgtatgtgatgtaatgagatgatttttttcctttgttgaaaactcgagtaaattgaagtgactttcatcttcctttgaaaaaaaaaa

SEQ ID NO: 41 - DNA, 1457 bp, Lolium perenne
gctctcgctcacaccaaaatcgcccaccagcaccagcatctctcgatcggcagacgcatagatcgatgggctccaccgccgccgacatggccgcgtccgccgacgaggacgcgtgcatgttcgccctccagctcgcttcctcgtcggtcctcccgatgacgctgaagaacgccatcgagcttggcctcctggagatcctggtggccgccggcggcaagtcgctgaccccgaccgaggtggccgccaagctcccgtccgcggcgaacccggaagcgccggacatggtggaccgcatactccggctgctcgcgtcgtacaacgtcgtgacgtgcctggtggaggagggcaaggacggccgcctctcccggagctacggcgccgcgcccgtgtgcaagttcctcacccccaacgaggacggcgtctccatggcggcgctcgcgctcatgaaccaggacaaggtcctcatggagagctggtactacctcaaggacgcggtccttgacggcggcatcccgttcaacaaggcctacggcatgtcggcgttcgagtaccacggcacggacccgcgcttcaaccgcgtcttcaacgaagggatgaagaaccactccatcatcatcaccaagaagctcctcgagctctaccacggcttcgagggtctcggcagcctcgtcgacgtcggcggcggcgtcggcgccaccgtggccgccatagccgcccactaccccaccatcaagggggtcaacttcgacctcccccacgtcatctccgaggcgccgcagttcccgggcgtcacccacgtcggtggcgacatgttcaaggaggtgccctcgggagacgccatcctcatgaagtggatcctccacgactggagcgaccagcactgcgccacgctgctcaagaactgctacgacgcgctgccggcgcacggcaaggtcgtgctcgtcgagtgcatcctgccggtcaacccggaggccaatcccagctcgcagggggtcttccacgtcgacatgatcatgctcgcgcacaaccccggcggcagggagaggtacgagagggagttccaggctctcgccaggggagccggattcaccggcgtcaagtccacgtacatctacgccaacgcgtgggccatcgagttcaccaagtagatgagatccctccaagcatccaggcaacatgtccccccgatatgagaacgatcgtcgtcgatcttggtgggtgctgccgctgctcctgcatcgatcaccctttgcttggtttttcctctgttttccctaattttttcatgctttaaaaccattctgaattttaatggttgggtcgccgatctgctcggaatgtaccattaaaaacgatgttttgaaaaggttgggtatgttggaaacttgtatgtgatgtaatgaaatgatttttttccctttgttgaaaaaacgagtaaattgaagtgaaaaaaaaaa

SEQ ID NO: 42 - DNA, 1452 bp, Festuca arundinacea
gctcgctcacaccaaaatcacccaccagcaccagcatctctcgatcggcagaggcagagatcgatgggctccaccgccgccgacatgaccgcgtccgccgacgaggaggcgtgcatgttcgccctccagctcgcctcctcgtcgatcctcccgatgacgctgaagaacgccatcgagcttggcctcctggagatcctggtggccgccggcggcaagtcgctgacccccaccgaggtggccgccaagctcccgtccgcggcgaacccggaagcaccggacatggtggaccgcatgctccggctgctggcgtcgtacaacgttgtgtcgtgcctggtggaggagggcaaggacggccgcctctcccggaactacggcgccgcgcccgtgtgcaagttcctcacccccaacgaggacggcgtctccatggcggcgctcgcgctcatgaaccaggacaaggtcctcatggagagctggtactatctgaaggacgcggtccttgacggcggcatcccgttcaacaaggcgtacggcatgtcggcgttcgagtaccacggaacggacccgcgcttcaaccgcgtgttcaacgaagggatgaagaaccactccatcatcatcaccaagaagctcctcgagctctacgacggcttccagggactcggcaccctcgtcgacgttggcggcggcgtcggcgccaccgtggccgccatcaccgcccactaccccgccatcaagggggtcaacttcgacctcccccacgtcatctccgaggcgccgccgttcccgggcgtcacccacgtcggcggcgacatgttcaagaaggtgccctcgggcgacgccatcatgatgaagtggatcctccacgactggagcgaccagcactgcgcaacgctgctcaagaactgctacgacgcgctgccggcgcacggcaaggtggtgctggtggagtgcatcctgccggtgaacccggaggccaagcccagctcgcagggggtgttccacgtcgacatgatcatgctcgcgcacaaccccggcggcagggagaggtacgagagggagttcgaggccctcgccaggggagctgggttcgctggcgtcaagtccacatacatctacgccaacgcctgggccatcgagttcaccaagtagatgagatccctccatccaggcaacctcccaccgaaatgagaatcgtgggtattcgatcttgctggctgctgccgctgctcctgcatcgatctgcatacgtaccctttgcttggtttttcctctgttttccgtaattttctcatgctctgaatccattctgaattctaatggttgtgtcgtcgatctgctcggaatgtaccattaataatgctgttctgaaaaggttgcatatgttgtatatgatgtaatggcatgatttctctcctttgttgaatataccagtacattgaagtgtcaaaaaaaaaa

SEQ ID NO: 43 - DNA, 1440 bp, Lolium perenne
gctcgggtctctcgctcatactaccaaaaacacccagcagcacaccagcgtctctcggcccaggagaagcagacacaggcagagatgggctccaccgcagccgaaattgccgcgtccgccgacgaggaggcgtgcttgtacgccctccagctcggctcgtcgtcgatcctcccaatgacgctgaagaacaccatcgagcttggcctcctggagaccctcatggccgccggcgggaagtcgctgacccccaccgaggtggccgcaaagctcccgtgcgcagcgaagaacccggaagcaccagacatggtggaccgcatgctccggctgctggcgtcgtacaacttagtgtcgtgccttgtggaggagggtacggatggccgcctctcccggcggtacggcgccgcgccggtgtgcaagttcctcacccccaacgaggacggcgtctccatggcggcgctcgcgctcatgaaccaggacaaggtcctcatggagagctggtactacctgaaggacgcggtccttgacggcggcatcccgttcaacaaggcgtacggcatgtcggcgttcgagtaccacggcacagacctgcgcttcaaccgcgtgttcaacgaagcgatgaagaacaattccatcatcatcaccaagaagctcctccagctctacgacggcttccagggcctcggcaccctcgtcgatgtcggcggcggcgtcggcgccaccgtggccgccatcaccgcacactaccccaccatcaaggggatcaacttcgacctcccccacgtcatctccgaggcgccgccattcccgggcgtcacccacatcggcggcgacatgttcaagaaggtgccctcgggtgacgccatcctgatgaagtggatcctccacgactggagtgaccagcattgcgccacgctgctcaagaactgctacgacgcgctgccagtgcacggtaaggtggtgctggtggagtgcatcctgccggtgaacccggaggccaagcccagctcgcagggggtgttccacgtcgacatgatcatgctcgcgcacaacccaggcggcagggagaggtatgagagggagtacgaggcgctcgccaggggagctggcttcgccggcttcaagtccacatacatctacgccaacgcctgggccatcgagttcaccaagtagacgagaatcatgggtcttcgatcttgctggatgctgctgctgctccttcggtcaatctgcatgtgtaccctttgcttggtatttcctctgttttccataattttctcatgctctgaatctattccgaattctgatggctgtcgtcgatctgctcggaatgtaccattaataacgctgttcggtaaaggttgcatacagtatgttgtatgtgatgtaatgagatgatttatcccctttgttgaataaataaatttaagcttaaaaaaaaaa

SEQ ID NO: 44 - DNA, 2102 bp, Lolium perenne
gcatcaacctaaaacccacgctatccaacaccccctagagaaaaacaaaaacaaaaagattacagttcctggtttgagtatcaatcgatggtgggcttcgctaagatcgccatggagtggatccaagatccactgagctggctgttcatcgcctccgtggttttcgtggttctgcagcggcggcggcggggcaacgtggcgccgtttcccccgggcccgaaaccgctgccgatcgtcggcaacatgtcgatgatggaccagctcacccaccgtggcctggcggcgctagcgaaggagtacggcggccttctccacatccggctcggtaagctccacacctttgccgtgtcgacgccagagtatgcccgggaggtgctgcaggtgcaggacggtgccttctcgaaccgtcccgcgaccatcgccatcgcgtacctcacctacgaccgagccgacatggcgttcgcgcactacgggcccttctggcgccagatgcgcaagctgtgcgtgatgaagctcttcagccggcgccgcccggagacgtggctcgccgtgcgcgacgagtccgcggctctcgtccgcgccgtggccaggcggaccggcgagtccgtggacctcggcgagctcatttttaaactcaccaagaatgtcatcttccgcgccgcgttcggagctggtgcggtcgccgccgacgccgaggagggcgacggagcagggaagcaggacgagttcatcgccatcctccaggagttctccaagctcttcggcgccttcaacatcggagacttcatcccgtggctgagctgggcggacccgcagggcatcaacgtgcgcctccgcgccgcgcgcaacgccctcgacgagttcatcgacaagatcatcgacgagcacatggagaggggcaagaatcccgatgatgccgatgccgacatggtggacgacatgctcgcgttcctcccggaggcgaagccgaagaagggcgccgccggcgacggcgtggacgacctgcagaacacgctccgcctcacccgcgacaacatcaaggccattatcatggacgtgatgtttggcgggacggagacggtggcgtcggcgatcgagtgggcgatggcggagatgatgcacagccccgacgacctccgccgcctgcagcaggagctcgtcgacgtggtggggctcgaccggaacgtggacgagtcggacctcgacaagctccccttcctcaagtgcgtcatcaaggagacgctccggctgcacccgcccatcccgctgctcctccacgagaccgccgaggactgcgtcgtcggcggctactccgtgccccggggctcccgcgtcatgatcaacgtctacgccatcggccgcgaccgcagggcgtggaaggacgccgacgtgttccggccgtcgcggttcgtgcagggggaaggggaggccgccgggctcgacttcaaggggggatgcttcgagttcctgcccttcgggtcaggccgccgctcctgccctggcatggcgctcggcctgtacgcgctggagctcgccgtggcgcagctcgcgcacggtttcagctgggagctgcccgacgggatgaagccgtcggagctggacatgagcgacgtcttcggcctcaccgccccgcgcgccaccaggctcttcgccgtgcccacgccccgcctcgcatgcacccagctgctgggagctgacgacgccgggcgccaggcgtgacggccattgctgtgttagcaagcgatcgatggtatatgtaccagctggccggaagatgaaggtgtttgatatattcagaggtgatggcggaggcgccattggtggagcttggtggttttatcttgctttttttttactatttttcttaaactttgaactcaattaagtctggtgacaacagaacccaataagcggattatcatgcttgctggatgcatgcttggatacagtgttaagcatgatgtgttttaccatgaagaacgcaaattgtaaaaacaagtttttagacctgctgccccgagattctgtattttcttcctcttggttttccatcgtgaggactatattaatgccaggatgatagtacccgttgaaaaaaaaaa

SEQ ID NO: 45 - DNA, 2051 bp, Festuca arundinacea
gagagcatcaacctaaaacccacgcgatcgaacacccctagaaaaaaaaacaaaaacaaaaagattacagttcctggtttgagtatcaatcgatggtgggcttcgctaagatcgccatggagtggctccaagaaccactgagctggctgttcatcgcctccgtggttttcgtggttctgcagcggcggcggcggggcaacgtggcgccgtttcccccgggcccgaagccgctgccgatcgtcggcaacatgtcgatgatggaccagctgacccaccgtggcctggcggcgctcgcgaaggagtacggcggccttctccacatccggctcgggaagctccatgcctttgccgtgtcgacgccggaatatgcccgggaggtgctgcaggtgcaggacggcgccttctcgaaccgtcccgcgaccatcgccatcgcttacctcacctacgaccgagccgacatggcgttcgcgcactacgggcccttctggcgccagatgcgcaagctgtgcgtgatgaagctcttcagccggcgccggccggagacgtggctcgccgtgcgcgacgagtccgcggcgctcgtccgcgccgtggccaggcggagcggcgagtccgtggacctcggcgagctcatttttaaactcaccaagaatgtcatcttccgcgccgcgttcggcgctggtgcggtcgccggcgacggcgacggcgacggagcagggaagcaggacgagttcatcgccatcctccaggagttctccaagctcttcggcgccttcaacatcggagacttcatcccgtggctgagctgggcggacccgcagggcatcaacgtgcgcctccgcgccgcgcgcgccgccctcgacgagttcatcgacaagatcatcgacgagcacatggagaggggcaagaatcccgacgacgccgacgccgacatggtggacgacatgctcgcgttcctcccggagacgaagccgaagaagggcgccgccggcgacggcgtggacgacctgcagaacacgctccgcctcacccgtgacaacatcaaggccatcatcatggacgtgatgtttggcgggacggagacggtggcgtcggcgatcgagtgggcgatggcggagatgatgcacagccccggcgacctccgccgcctgcagcaggagctcgccgacgtcgtggggctcgaccggaacgtggacgagtcggacctcgacaagctccccttcctcaagtgcgtcatcaaggagacgctccggctgcacccgcccatcccgctgctcctccacgagaccgccgaggactgcatcgtcggcggctactccgtgccccggggttcccgcgtcatgatcaacgtctacgccatcggccgcgaccgcaaggcgtggaaggacgccgacgtgttccggccgtcgcggttcgtgcagggggaaggggaggccgccgggctcgacttcaaggggggatgcttcgagttcttgccctttgggtccggccgccgctcctgccctggcatggcgctcggcctgtacgcactggagctcgccgtggcgcagctcgcgcacgggttcagctgggagctgcccgacgggatgaagccgtcggagctggacatgagcgacgtcttcggcctcaccgcgccgcgcgccaccaggctcttcgccgtgcccacgccccgcctcgcatgcacccagctgctgggggctgacgacgccgggcgtcaggcgtgacgtcgtcgtgcgcgcgcgcggccattgttgtgttagcaagcgatcgatggtatatgtaccagctggaagatgaaggtgtttgatatattcagaggtgatggcggcggcgccattggtggagcttggtggttttctcttgctttttttacaactgttgttttactttgaactcaattaagtctggtcacaacagaacacaataagcggattatcatgctcgctggatgcatgcttaggatacagttaagcatggcgtgttctaccatcaagaccgcaaattgtataaaaagtttttagacctgctgcaccgcaaattgtataaaaaaaaaa

SEQ ID NO: 46 - DNA, 2461 bp, Lolium perenne
ggttctttgcaacgatcaacactgtcagaatccagatacacacacacacacacacacaccaagcagcgtctagctagcttacttgctctagtagttctttgcaaatatccatggagtccgagaacgttgccgccaacggcgatggcctgtgcgtggcacagccggctcgcgccgaccctctgaactggggaaaagcagccgaggagctgtctgggagccatcttgatgccgtgaagcgaatggtggaggagtaccgccgccctgtggtgaccatggaaggcgccagcctgactatcgccatggtcgctgcggtggctgccggcgccgacaccagggtggagctcgacgagtccgcccgcggacgcgtcaaggagagcagcgactgggtcatgaacagcatggccaacggcaccgacagctacggtgtcaccaccggcttcggtgccacctcccaccggaggaccaaggagggtggcgctctccagagagagctcatcaggtttctcaatgcgggagcattcggcaccggcagcgatggccacgttctgcccgctgcgacgacgagggctgccatgcttgtccgtgtcaacaccctgctccagggctactctggtatccgctttgagatcctcgagacggtcgccacgcttctcaacgccaacgtgacaccgtgcctaccgctccggggcacgatcacggcatccggtgacctcgttccgctgtcctacatcgcgggccttgtgaccggccgcccaaattctgtggcgactgctccggatggcacgaaggttaacgctgcagaggcattcaaaatcgcgggcatccagcacggtttctttgagctgcagcctaaggaaggccttgccatggtcaacggcaccgcggtgggctccggactggcgtccatggtgctcttcgaggctaacatccttggcatcctcgctgaggttctgtcggctgtgttctgtgaggtcatgaacggcaagccagagtacaccgaccacctcacgcacaagttgaagcaccaccctggtcagattgaggccgcggctatcatggagcacatccttgaaggaagctcctacatgatgctcgcgaagaagctcggcgagctcgacccactgatgaagccgaagcaagataggtatgcccttcgaacatcaccgcaatggctgggccctcagattgaggttatccgtgccgccaccaagtccatcgagcgcgagatcaactccgtcaacgacaacccgctcatcgacgtctctcgaggcaaggccatccatggtggcaacttccagggcacacccatcggtgtgtccatggataacaccaggcttgccattgctgcgatcggcaagctcatgtttgcccagttctctgagctagtgaacgacttctacaacaatggtttgccttccaatctctcgggtgggcgcaacccgagcttggactatggcttcaagggtgctgagattgccatggcctcctattgctccgagctccaattcttgggcaaccctgtgactaaccatgtgcagagtgcggagcagcacaaccaagacgtcaactctcttggtctcatctctgctaggaagacctctgaggccatcgatattctgaagctcatgtcatcgacattcttggttgcactgtgccaagctatcgacctccgccacctcgaggagaatgtcaagaatgccgtcaagaactgtgtgaagatggtggctaggaagaccctgagcaccaatgacagtggccatctccacagcgcacgcttctgcgagaaggacctgctcttgacgatcgaccgcgaggcggtgttcgcctacgcagacgacccttgcagcgctaactacccactgatgcagaagatgcgtgcagttctcgtggagcacgccttggccaacggtgaggctgagcgggatgtgcagacgtcagtgttcgccaagcttgccgcattcgagcaggagctccgtgcagtgcttccaagggaggtcgagtcagcccggtgtgctgtggagaatggcaccgccgcgcagcaaaaccgcatcaccgaatgccggtcgtacccgctgtaccgcttcgtgcgcaaggagctcggaaccgagtacttgaccggagagaagacgaggtctcctggtgaagaggtggacaaggtgtttgtggctatgaaccaggggaaacacatcgacgcactgcttgagtgcctcaaggagtggaacggtgagcccctgcctatctgctgaagaatgaatcaaggaactgaagaatagagtacttgagagttcagaaggctccacatgtgcttagttaatagtaagtatagtactgttttttcattgtatcttgtgcattatatatacatgtaacactggaataaaatttcaaaaaatcagatcactcaatgggcagcatgtaacactggaataaaaatttcaaaaaaatcagatcaaaaaaaaaa

SEQ ID NO: 47 - DNA, 2596 bp, Festuca arundinacea
gctcctctgtaattcgagctcctcttcagcacaagtacttccaccagagtgccagacaacaatccagcaccacttccagaatacatacacacacgtacccgtgtctaaaccttacttgctttcctagttctttgcatatctccatggagtgcgagaacgggcacgttgccgccaacggcgatggcctctgcgtggcgcagccagcccgggccgaccctctcaactgggggaaggcagcagaggagctgtccgggagccatttggatgccgtgaagcggatggtcgaagagtaccgcagaccagtcgtgaccatggagggcgccagcttgaccattgctatggtcgccgcggtggccgccggcgccgacacccgggtggagctcgacgagtccgcccgcggacgcgtcaaggagagcagcgactgggtcatgaacagcatggcgaacggtaccgacagctatggtgtcaccaccggcttcggcgccacctcacaccggaggaccaaggagggtggcgctctgcagagagagctcatcaggttccttaacgcgggagcatttggcaccggcagcgatggccatgttttgcccgctgcaacaaccagggcggccatgctcgtccgtgtcaacactctgctccaggggtactctggcatccgcttcgaaattctcgagacgatcgccacgcttctcaatgccaacgtgacgccgtgcctaccgtaccggggcacaatcacggcatccggcgacctcgtcccattatcctacatcgccggccttgtgactggccgcccaaactctgtggcgacagctccagatggcagcaaggttaacgcagcagaggctttcaagattgccggcatccagcatggcttctttgagctgcagcccaaggaaggccttgccatggtcaacggcactgccgtgggctccgggctcgcgtccatagtgcttttcgaagctaacatccttggcatccttgccgaggttctatcggccgtgttctgcgaggtgatgaatggcaagccggagtacaccgaccacctaacacacaagctgaagcaccacccgggccagatcgaggccgcggccatcatggagcacatccttgaaggcagctcctacatgatgctcgcgaagaagctcggtgagctcgacccactgatgaagccaaaacaagataggtatgcactccgcacatcaccacaatggctcggccctcagatcgaggtcatccgtgctgctaccaagtccatcgagcgtgagatcaactccgtcaacgacaacccactcatcgacgtctcccgcggcaaggctatccacggtggcaacttccagggcacgcccatcggtgtgtccatggacaacaccaggcttgccattgcggccatcggcaagctcatgtttgcccagttctcggagcttgtgaacgatttctacaacaacggtttgccttccaatctctctggtgggcgcaatccgagcttggactatggcttcaagggtgctgagattgctatggcctcatactgctccgagctccagttcttgggcaaccctgtgactaaccatgtgcagagcgccgagcagcacaatcaagacgtcaactctctcggcctcatctcttccaggaagaccgctgaggcgattgacattttgaagctcatgtcctcgacattcatggttgccttgtgccaagctatcgacctccgccacatcgaggagaatgtcaagaatgccgtcaagaactgtgtgaagacggtggctaggaagaccctgagcaccaatgacagtgggcatctccacaatgcacgcttctgcgagaaggacctgctcctgacgatcgaccgtgaggcggtgttcgcctacgcagatgacccttgcagcgccaactacccgctgatgcagaagatgcgtgcggttctcgtggagcatgccttggccaacggtgaagccgagcaggacgtgcagacgtcagtgttcgccaagcttgccacattcgagcaagagctccgtgcggttcttcccaaggaggtcgagtctgcccggtgttccgtggagaacggcaccgccgcacagcagaaccgcatcagcgaatgccggtcatacccgctctatcgcttcgtgcgcaaggagctcgggactgagtatttgaccggagagaagacgaggtctcctggtgaagaggtggacaaggtgtttgttgctatgaaccagggtaagcacattgacgcgctgcttgagtgcctcaaggagtggaacggtgagcccctgcctatctgctgaagaatggctcaaggaactcaagaatagagtgcttgagaattcagatggtactgttttataattatatctccggatatcgatgtttgcaatgttcctccagagctgcaatgccagttagaaaagataatagcatgacttggtagtgttgtttagcctagaaattttctatgatgttagttagtaaaagggtacactttgtgataaatatacataattattgcactagtcctttatttttatatcaatgttctgtctactgaggcaactttgaaggattcaaagaatctagtattggcctgccaaaaaaaaaa

SEQ ID NO: 48 - DNA, 1301 bp, Festuca arundinacea
ggtcccttgtatcagctgatcatggctttttccggcagcgtcagcggcgttgttctcgtcgtggcgatcctgcttctgggtctggccgcggcggcgtcggcacagctgtcggcgacgttctacgacgcgtcctgcccgagcgcgctcgcgacgatcaagagcgccgtgacggcggcggtgaacaacgaggcccgcatgggagcctccctgctcaggctccacttccacgactgtttcgtccaaggatgcgacgcgtcggtgctcctcaacgacaccgccaacttcaccggcgagcagacggccttccccaaccgcaactccatcaggggactcaacgtcatcgacaacgtcaaggcgcaggtcgaggccgtatgcacgcagaccgtctcctgcgccgacatcctcgccgtcgccgcccgcgactccatcgtcgccctaggagggccgtcgtacacggttccgctggggaggagggactccaccaccgcgagcctgtccgaggcgaacagggacctcccgccgccgtcctccgacctcgccgatctcgtcggcaacttctccaggaaaggcctcagcgtcaccgacatggttgcgctctcaggagcccacacgatcgggcgggcggcatgcttaaacttccggagccggatctacggcgagtccaacatcgccccggcgtacgcggcgtcgctgcaggccaactgcccgcagtccgcccccaatggcgacggtacactcgcaccgctcgacgtgtccacccccgacgccttcgacaacgcctactacggcaacctgctctcgcagcaggggctcctccactcggaccagcagctcttcaacggcggctcgaccgactccctcgtcagcacctacgcctccaacgccgcgcagttcagcggcgacttcgccgcggccatggtgaacatgggcaacatcggcgtgctcaccggcgcccagggggagatccggctcaattgtggcaaggtgaattgagtgaaagcccgacaactgagactgcaggtgaaagtggatggggcacatgcaattgcgaagctgggctggtagctttactgaaaccgaataaggtgtcaacgtgaaggccatattgatgtgcttattgggcctatcttggaattccttacagggattcagattcagtcatttctccttcgcatggtctatttgtttcccacagaaaataaggatataataatactgtataatcctgtaaaaaaaggaaacgatactgtatagttgtgcctatcaacaaccacatttctggttgaaagctaaaaaaaaaa

SEQ ID NO: 49 - DNA, 1236 bp, Lolium perenne
gagatggcttcttcttcctcccccttttctcgggtctcccagctagccgtcaaggcgacggtcctggcggccgtctgcctcctcctccacggcggaggcgggagtagcgcatcggcggcggagctgtgcgtgagctactacgaccacacgtgtccggacgcgtacaagatcgtgcagggggtgctggtggaggctcacaagtcggacccgcgcatcttcgccagcctcatccgcctccatttccacgactgcttcgtgctgggctgcgacggctcgctgctgctggacaccttccccggcttccagtccgagaaggacgcgcgccccaacaacaactcggcgcgcggctaccccgtcgtcgacgccgccaaggccgctctcgagaaggcgtgccccggagtcgtctcctgcgccgacatcctcgccctcgccgccgagatctccgtccagctgtccggaggacccgggtggggcgtgttgctggggaggctggacggtaagacctccagcatagccggcgcccagaacctacccggcccgttcgacggcctcaagaatctcacccttaagttccaagccgtcaatctcgacgttactgacctcgtcgctctctcaggtgctcacactttcggtcgcgtgaaatgccggttcgtcacgaaccgtctgtacaacttcagcgggacgaaccagcctgacccgaccctaaatgcggcttaccgggcgttcctgtcaacgagatgcccaaggaacggcgatgcaaactctctaaatgaccttgatccgacgacgcccgacacctttgacaagaactacttcacgaacctcgagaaaaatcgcggctttcttgactctgaccaacaactcaaatcagacccaggtgcattaacgacgacggcgccgattgtcgataggtttgcaagcagccaggacgcattctttaagagcttcgcatggtctatgatcaagatgggaaacattctgccaattacagatccctcccgtggagaagtccggaaacactgcgcgtttgtcaattgatgttaattagcaagaaggccacatgtggatacaactacggcctatgctatatgcgcaaaatcatggatctcattgtcatgttcaataattggtaatatatatgccaaccaatgtacgtaagattatgtgcatgctttgatcccacaagtgcaatgaagtgaaatcttatttcccgtttgaggttgatcaaaaaaaaaa

SEQ ID NO: 50 - DNA, 1205 bp, Festuca arundinacea
gcaagcttccctcgattagctaccttgtctagccaccgtcgtccttgcacagccaaggaagaagcaaagctatttggcttctaacaatggcgacgaggggtgtcatggtggcgctgctgctcgcggcggtggcggcgtcttgcgctcatgcacagctgcacgagaagttctacagtgagtcgtgccccagcgtggaggacgtcgtccggaaggagatggtcatggcgctatccctcgcgccaagcctcgccgcgccgctcctcaggatgcacttccacgactgcttcgtcagggggtgcgacggctcggttctgctggactcggcgaacaagacggcggagaaggacgcgctgcccaaccagacgctgcgcggcttcgacttcgtcgagagggtgaaggccgccgtggagaaggcctgccccgacaccgtctcctgcgccgacgtggtcacgctcatagccagggacgctgtctggctgagcaaaggcccattctgggaagttcctttgggccggcgagacggcagcgtgtccatctccaacgagaccgacgcgctgccccctcccaccgccaacatcaccgtgctcacccagctcttcgccgccaagaaccttgacatcaaggacctcgtcgtcctctctgccgcgcacacgatcgggacatcgcactgcttctccttctccgaccggctctacaacttcacgggcctcgacaacgccagcgacatcgaccccacccttgaacctttctacatggcaaagctgaagagcaagtgcaccagtctcgacgacaacagcacgctcgtggaaatggaccccgggagcttcaagaccttcgacctcgactacttcaagctcgtcagcaagcggaggggcctcttccactccgacggtgccctcctcaccgacgccttcacccgtgcctacatcctgcgccacgccaccggcgccttcaaggacgagttcttcgccgactttgccgtctccatggtaaagatgggcaacaccgacgtgctcactggaagccagggcgagatcaggaagaagtgctccgtggtgaaccattagttagccgtggaagtaccggttggcataccaacccttttgatttgtgaccatgttttttttctgtgtagattattactgtaaaaccgttacttcattttcctctccccaagttcttttcttcgttggttaaaaaaaaaa

SEQ ID NO: 51 - DNA, 1382 bp, Lolium perenne
ggccacaactcgccacatttggcatagcgagcactgacagcgagctacatccatcaccatggcttctagccgtgtcctgctcctcgtcgtggcagctctggcgatctccgtgtccgccacggccgcggccaccaagatcagtgctccactaccgccgctggccaagggcctgaacttcgatttctacaaggccacctgcccgcaggccgagtccatcgtcttcaacttcctccgcgacgccatccgcaaggacgtcggcctcgccgccgcgctcctccgcatccacttccacgactgcttcgtgcagggctgcgacggctccgtgctcctcgacaagaccggcggcaccgacagcgagaagatcgcaccacccaacgtcacgctccgccccaccgccttcaaggccatcaacgacctccgcgctctcctcgccaaggcctgcggcgccgtcgtctcctgcgccgacatcgccgccctggccgcgcgcgactccgtgcacctcgccggcgggccgcactaccccgtcccgctcggccgccgcgacgggctcgcccccgcgaacctcaccaccatcctcaacgccctcccggcaccgagctccaacgtcaccaccctcctcagattcctcgccaagatcagcctcgacgccaacgacctcgtcgcgctatccggcgcgcacacgctcggcatcgcgcactgcacctccttccaggagcgcctcttcccgcagaacgacgtcaccctcaacaagtggttcgcgtcgcagctcaggctcacctgcccggcgctcaacaccgacaacaccaccaacaacgacatccgcacccccaacgtcttcgacaacaagtactacgtcgacctgctcaaccgccagggactcttcacctccgaccaggacctgcacaccgacgccaggaccaagcccaccgtcaccaggttcgccgtcgaccaggccgcctttttcgaccagttcgtcttctccgtcgtcaagatgggccagatcaacgtgctcaccggcagccagggacagatacgcaacgactgctccgcgcccaacaaaggccgcaccaacgacgacctgccgtggtccgtgctcgagaccgtcaccgaggccgcccagagcttggtgttgtagatatgcgctgtggataggttggttcagtcgatccatctctagcctacgtactttcttcccaaagttgtagctttattagcgagccgtgtggtaatggtttgggctttgagagccacagttgatgcatgtgtgtttagtttcttgagcaactcgaccagtttaataatcacgagatggtttttggtgtgtcgaatgacgactagaaaattgagatgaatatttgatgttattttcaataaaaaaaaaa

SEQ ID NO: 52 - DNA, 1261 bp, Lolium perenne
gatcgcctttctcctccatgaccaccatgggcggctcgtcgatcctgcccgcgccgaccgtggcgacgacggcgctggttctgctgatcgtgctgttcgcatcgccggcaacggtggcgaaaggttctgggctgtccgtcgggttctacaagaagttgtgtccgaaggcggagaaggtcgtccggcgaactgtcaccaaggcctttgagaaggagcctggcaccccggccgacatcatccgcctcttctttcacgactgctttgtccgagggtgcgacgcatcggtgctgctggaatccacgccagggcgcatggcggagagggactcgaaggcaaacaaccccagcttggatgggtttgaggtcattagcgacgccaaggagacccttgagaagctctgcccgcaaaccgtctcctgtgctgacattctcgccctcgccgcccgcgatggcgcctacctcgctagcgggctcgactatgcggtgcccaccggccgccgtgatggcctcgtctccaaggaagacgaggttctccctagtgtccctcaccccgacttcaaccattctcagctcgtggaaaacttcacggcaaaaggctttacggcggaggagatggtgacgctgtcgggggcgcacaccatcggcacctcgcactgctcgtccttcacggaccgcctctacaacttctcccagggcggcgcgctgaccacggaccctgcgctgccggcggcatacgccgcgctgctgaaggagaagtgcccgccggagacagcggcgcagaacgacaccaccatggtgcagctcgacgacgtgacgccgttcgtgatggacaaccagtactacaagaacctgcttgccggcaccgtgccgctcggctccgacgtagcgctcatggagagccccgacacggcggcgctcgtcgagctctacgcccgcgagcccgccgagtactgggccaagcgcttcgttgcggcgatggtcaaggtgagcgagatggaggtgctcaccggggccgagggggagatccggctcaactgctccaaggtgaactagtatataaccggttgctgcgtttgtctctgtactatatgtttgggaaagatgacgatacacgttcttcttttgtgttaatgttttttctttcatttgttttcatatggtggtgagaaatatatacacatttgtttgcgtcataaactgtaaagcttacacagcatgcataaaagcatctatatcattccatttgagttgtaaaaaaaaaa

SEQ ID NO: 53 - DNA, 1059 bp, Lolium perenne
acgagggagaactactacgggtcttcttgtcccaccgcgcttctcaccatcaggactgtcgtgacgacggcggtgctgctggaccaccgcatgggcgcttctcttctccggctccacttccacgactgctttgtgcaagggtgcgacgcgtccgttctgctggatgacacggccggcttcaccggcgagaagggggccgggccgaacgccgggtcgctgcgcggtctggaggtgatcgacaagatcaagatgctgctggagttcatgtgcccgcggaccgtctcctgcgccgacatcctcgccgtcgccgcccgcgactccgtcgtccgtctaggggggccatcatgggcggttcaacttggaaggagggacgccaccacagcaagcgcgtcacttgctagtagtgacctcccaggccccaactccaacctcaatgatctcctcaccgctttctccaaaaaaggactaagcaccacggacatggttgctctatcaggggcccataccatcggccgggcgcagtgccagaactaccggaaccggatctacaccgacaccgacattgacggggcattcgcagcgtccctgcgaggcggctgcccacaggccggcggcgacggcaacctcgcgccgctcgacgcgtcctctcccaacaccttcgataacggctacttctccggcctcctctcccgccaggggctgctccattccgaccaggcgctgtacgacggcggctccacggacgatctggtcaggacctacgcctccaataacgatcagtttggcagcgacttcgctgcggcgatggtgaaactgagcaatatcggcctgctgacggggtcgtccggggagatcagggtcaactgccgggcggtgaattaacgatggatggatgggggcatcatgaaacgaacaaggcgtgcgatttccggaactgcaggcaacgaaactgcatatttatgtacactgcctatttatttcctgtccttgtgtccccgtcttgttatattacatccataatccatgttaagatggtggcattggtttaaaaaaaaaaaa

SEQ ID NO: 54 - DNA, 1266 bp, Festuca arundinacea
ggccagataacaagtgcaggcagcaaaccagttacaggcacgccgcaatatagcttgggtcttgtagctagccatagccatggcatctgcctcttgcatttctttggtgttgctggtggctctggccgccacggcggcgtcggcgcagctgtcgtcaacgttctatgacacgtcgtgccccagggccctggccaccatcaagagcggcgtggcggccgccgtgagcagcaacccccgcatgggtgcgtcgctgctcaggctgcacttccacgactgctttgttaatggctgtgacgcgtccgttctgctgtcgggcaacgagcagaacgcgcccgcgaacgccggttcgctgtttggcttcggcgtcatcgacaacatcaagacccagctcgagggtatctgcaagcagaccgtctcctgcgccgacatcctcaccgtcgccgcccgtgactctgtcgtcgccctcggaggcccgtcatggacagttcctctcggcagacgggactcgacgagcgcaaccggcaataccggggacctcccgggccctggatccagcctcgcacagctccaggccgcgttcgccaagaagaacctgaacaccgtggacatggtagcgctctccggcgcgcacaccatcgggcgggcgcagtgccagaacttccggtcgcggatctacggcggcgactctaacatcaacgccgccttcgcgacctcgctcaaggccaactgcccgcagtccggcggcaacggcaacctggcggcgctggacgccacgaccgccaacgccttcgacaacgcctactacaccaacctgctctcccagaaggggctcctccactccgaccaggtgctcttcaacaacggcagcaccgacaacaccgtcaggaacttcgcgtccagcggggcggcgttcagcagcgccttcgcgacggcgatgatcaagatgggcaacatctcgccgctgacagggacgcaggggcagatcaggctcagctgctccaaggtgaactcgtgattagcgtacgaggagccgacagacagtcgccagcactatacgtcacgtgaatgaataaggccacagaaccggcggccaatccacagtactattagcagttcagcactagctagaaccgtgtatatatatacgtgcagctcaaaattattcatgcacctctacacatgtaactatcgaattctctcatgcaaaggcataaagaattacttcaatatatacaactacaactaccattattctcaaaaaaaaaa

SEQ ID NO: 55 - DNA, 1164 bp, Lolium perenne
gctagctccccggcgctaccttcgccttccgctccccctctccggccttgcgccctctgccgccaagtcgcctggcttggccggtcggcactcccctcatcccctggctcacccctcccctcaggctcctcttcctctcccctggccctggaggcagtcggtcggatctggccggtcgccggagacgcgctcggccgtccactgctcgccgccgctgccttctagccactaccgttcagcctccagagccaagcggcagtctagcccaacagcaggagcgtagaatagtgttacctcttgtttcattattcaatatacaaaatggccgtgtcggagcttgaggtcgacggcgtcgtcttcccgccgctggcccgtccgccgggcacagcccacgcgcacttcctcgccggcgcaggtgtgcgagggatggagctcggcggcaacttcatcaagttcacggccatcggcgtgtacctgcaggccgacgccgccgtgtccgcgctcgccacgaagtgggccgggaaacccgccgacgagcttgctgcagacaacgccttcttccgcgacgtcgtcacaggcgagttcgagaagttcacgccggtgaccatgatcctgccgctcaccggcgcgcagtactccgagaaggtgaccgagaactgcgtcgcgtactggaaggccgtcggcaagtacacgaacgccgaggccgccgccgtcgacaagttcaaggaggccttcaggactgagagcttccctcccggcgcgtccatcctcttcacccactcccccgccggcgtcctcaccgtcgcgttctcgaaggactcgtcggtaccagagtcgggcggcgtggcgatcgagaacaggccgctctgcgaggccgtgctggagtccatcatcggcgagcacggggtctcgccggcggcgaagctcagcctggcgaccagggtcgccgagctcctgaatgaggccgcccccgtcggccaagcggcggcagagcccgtgtcggtttctgcgtgaacggaccggacaccgtcactgctggcttgtgtggttggcgatgtccgttgttgagacgtcgtgttccggagtttctaccgttgttttctgttgtgtcgaggtgaaccgtgctaacttgaataaagaaaccgctgcccaagaaaaaaaaaa

SEQ ID NO: 56 - DNA, 933 bp, Festuca arundinacea
gtgcacacacagctacccatccaatccacccctgtctccggccgcgcgcgcatcgatctcataccatcggccgtctcggagcttgaggtcgacggcgtcgtcttcccgccgctggcccgtccgccgggcacagcccacgcgcacttcctcgccggcgcaggtgtgcgagggatggagctcggcggcaacttcatcaagttcacggccatcggcgtgtacctgcaggccgacgccgccgtgtccgcgctcgccgcgaagtgggccgggaaacccgccgacgagcttgccgcagacaacgccttcttccgcgacgtcgtcacgggcgagttcgagaagttcaggcgggtgaccatgatcctgccgctcaccggcgcgcagtactccgagaaggtgaccgagaactgcgtcgcctactggaaggccgtcggcaagtacacggacgctgaggccgccgccgtcgacaagttcaaggaggccttcaaggccgagagtttccctcccggcgcgtccatcctctttacccactcccccgccggcgtcctcaccgtcgcgttctcgaaagactcgtcgttgccggagtcgggcggcgtggcgatagagaacaggccgctctgcgaggccgtgctgaagtccatcatcggcaagcatggggtctcgccggccgcgaagctcagcctggcgaccagggtcgccgagctcctgaaggaggccgcacccgtcggcgagccggcggtggcagagcccgtgtcggtttcagcatgaacggactgggcaccgtcactgctggcttatacatgtggttggtgatgtccgtgttgagacatcgtgttccggagcttctaccgttgtttctcttgcgtccaggtcaaccgtgctaacttgaataaagaaaccccagccattgaaatttatttacatcaaataaaaaaaaaa

SEQ ID NO: 57 - DNA, 1531 bp, Lolium perenne
gactcattcatctgtcgtctcctgcttccctcaagcttagatcgattgcagccggccggggactgtcgagctaccactgccggtcgctggtacgagcggacgtaaggagagatccagatggccgcgacgatgaccgtggaggaggtgaggaaggcacagcgggcggaggggccggcgacggtgctggccatcggcacggcgacgcccgctaactgtgtctaccaggctgactacccggactactacttcaagatcaccaagagcgaccacctcgccgatctcaaggagaagttcaagaggatgtgcgacaagtctcagatcaggaagaggtacatgcacctgacggaggagatcctggaggagaaccccaacatgtgcgcgtacatggcgccgtcgctggacgcgcgccaggacatagttgtcgtcgaggtcccgaagctcgggaaggcggcggcacagaaggcgatcaaggagtggggccagccgcggtccaagatcacccacctcgtcttctgcactacctctggtgtggacatgccaggcgccgactaccagctcaccaagatgctcggcctgcgcccgtcggtgaagcgcctcatgatgtaccagcagggctgcttcgccggcggcacggtgctccgcctcgccaaggacctggctgaaaacaaccgcggcgcgcgcgtgctggtggtctgctcggagatcacggccgtgaccttccgcggcccgcacgagtcacacctcgactcgctggtcggccaggcgctcttcggggacggcgctgccgcggtgataatcggcgccgaccccgacgtgtccgtcgagcgcccgctgttccagctggtgtcggcgagccagaccatcctgccggactcggagggcgccatcgacggccacctcagggaggtcggcctcaccttccacctcctcaaggacgtgcccgggctcatctccaagaacatcgagcgcgccctggaggaagccttcaagccgctcggcatcgacgactggaactccgtcttttgggtggcgcacccgggcgggccggcgatcctcgacatggtggaggcaaaggtaaacctcaacaaggagcggatgcgtgccaccaggcacgtcctctccgagtacggcaacatgtccagcgcatgcgtcctcttcatcatggacgagatgcgcaagcgctctgccgaggatggtcacaccaccaccggcgagggaatggattggggcgtcctctttggcttcgggcccggcctcaccgtcgagaccgttgtcctccacagcatgcccattgccgctgatgccaccgcttgatcgatggttccatctccgtttatctgccacatcgatggatacctactactactaccgccgccgccgctgctatccaaagtaatttgtattgtattcatgcatacctggtttgtatttgttggtaggattcgttccgctattatgtcgcttgtgtcgcgtacactgttgtatcctagtaatagtaatcaaacggagtacggtttatgtaaaaaaaaaa

SEQ ID NO: 58 - DNA, 774 bp, Festuca arundinacea
acagatgtacttcgtgtccaagtccctggcggagaacgccgccatggactacgccaaagagaacggcgtggacttcatcagcatcatccccacgctcgtcgtcggccccttcctcagcgccggcatgccgcccagcctggtcaccgccctggcactcatcacggggaacgaggcccactactcgatcctgaagcaggtgcagctggtccacctggacgacctctgcgactccatgacctacctcttcgagcacccggacgccaacggccgctacatctgctcctcccacgacaccaccattcatggcatcgccaggatgctcaaggagaggttccccgagtacgacatcccacagaaattcccgggagccgacgacgaccttcagccgatccacttcttcttcaagaagctgctcgaccacgggttcaggttcaggtacaccgccgaggacatgttcgacgccgcggtctggacgtgcagggagaagggcctgattccgctcggagcggaaggggcaggcggcccggccagtgcagccggcaagctgggagctgttctcgtgggcgaaggtcaggcgattggtgctgagacataagcgctagtgcatgtacactaggctggctacctcagacacatggtggagcgatgattatgttcgttaattctactatcctatatttcggttcagaaattgcattaagagaaccctgtaattggtgggatattatgaacggattatggaacgcaaataacttcatgacggaaaaaaaaaaa

SEQ ID NO: 59 - DNA, 1211 bp, Lolium perenne
gggagcaccacacatggcgactgaagccaagggggagacggtgctggtcaccggcgccagcggcttcatcggctcctggctcgtccgcctcctcctcgcccgcggctactccgtccacgccgccgtcctcaaccccgatgacaaggccgagacggaccacctcctcgcgctcgccgctgcggccggcgacgagggccgcatccgcttcttcaggtgcgacctcctcgacggcgccgccatgctcgccgccgtgcggggatgctccggcgtgttccacctcgcctctccctgcaccgtcaacctcgtcctcaacccccaaaaggagcttgtggtgccggcggtggagggcacgctcaacgtgctgcgcgccgccaaggaagctgggggagtgcggcgggtggtggtgacctcctccgtctccgccctcgtcccctgcccggggtggccggccggcgaggtcctcgacgagcgctgctggaccgacatcgactactgcgacaagaacggggtttggtaccctgcttcaaaggcactggcggagaaggcggcatggaagtttgcagaggagaatggactggatgtggtgacggtcaatccagggacggttttgggcgagatgattccgccaaggctcaatgccagcatggccatgtttcttcgcttacttgaaggttgcaaagaggagtatgcagatttcttcatcgggccagtgcacgtggaagacgttgcattagcccatattctgctgtacgagaatccgtcagcatccgggaggcacctctgcgtggagcccatctgtcactggagtgttttcgcggcgaaagtcgccgagctctaccctgattacaaagttccaaaattccctgaggacacacagcctgggctggtgagggcgaaggcggtgccaaaaaagctgatggcgttgggtttgcagttcactcctcttgagaagatcatcagggatgccgtggagagcctcaagagcagaggatgcatcgcctgatgattggatcgttaggcatgtcacccttccgtcgtaggttcatgatcatccttgttgaaaaatgtgttgtgttgtgtccagcccagtgcctacccagaccatatacttaccagtatgatttgtgcaataacagccggttgatgtacggcatcacctgccctacacttgggatgcggatgctgtcacactgactccctcaaaaaaaaaa

SEQ ID NO: 60 - DNA, 1229 bp, Lolium perenne
ggctcaaccaagggcaaagtgtgtgtaactggggcttcaggctttgttgcctcttggctcatcaagaaactccttgagtctggatatcatgtgatagggactgtcagagacccagggaatcgaagaaaggtgggacacctttggaaactaccaggtgcaaatgagaggctccaacttgtgagagctgatctattggaggaagggagctttgacgatgctgtaagggcttgtgagggtgtcttccacattgcgtcgcctgtccttgggaaatctgattccaattgcaaggaagcaacactcggtcctgcaatcaatggtaccctcaacgtgctaagatcctgcaagaagagtccatttctcaaaagggttgttctcacatcttcatcatccgcggtaaggattagggatgaaactcagcagccagaactgttatgggatgaaacgacatggagctctgtgccactctgtgaaaagctacagctatggtatgccctggcaaaggtatttgcagagaaagcagcattggactttgccaaggagaataacattgaccttgtgacagttcttccatcattcgtaattggacccagtttatcccatgaattgtgcactactgcttcagatatccttggcttacttcaaggtgacacagacaggttcactttgtacggaaggatgggatatgttcacatcgatgatgttgcccggagccacattctagtgtacgaaacaccggaggcaactggcagatatctgtgcagctcagtggttctggataacaatgaattggttggcttactggcaaaacagtttccagtattccccattccaaggaggctcaagaacccctatggaaagcaggcataccagctagacacatccaagctccaggggctgggtctcaagttcaaaggagtgcaggagatgtttaacgactgcgtcgaatcgctgaaagatcagggccatttgctggagtgcccgttgtgataacagagacagcattgacaagccatagccaaacagcattgacaagccatagccaaacacatctcaactatgcctgaatcatgtcagttctcgagtcatagattttttttttctcttcaaataattcccatgtactctccttactataccgaacatcaattgtcagcggcagattaaatgtgtccatatgctttgcaattgtttcaattagtaatgaaatatttgaaacaaaaaaaaaaaaa

SEQ ID NO: 61 - DNA, 1439 bp, Lolium perenne
aaacgactccaacgcaccgatcgacgacacacccctgcacttcacgggtcgatcggatcggaggatggcgccggtggtggagagagcgcccttcctgccgacgggggaggccacgctgcggccgtccttcgtgcgggacgaggacgagcggcccaaggtggcgcacgaccgcttcagcgacgaggtgcccgtcatctcgctccacggcatcgacgacgcgcggaggaccgagatccgggaccgcgtggcggcggcgtgcgaggggtggggcatcttccaggtcgtcgaccacggcgtcgacgccgcgctcatcgccgagatggccaggctctcgcgcgacttcttcgcgctccccgccgaggacaagctccgctacgacatgtccggcggcaagaagggcggattcatcgtctccagccacctccagggcgagacggtccaggactggcgggagatcgtgacctacttctcgtacccggtcaaggcgcgggactacggccggtggccggacaagcccgcggggtggcgcgcggtggtggagcagtacagcgagcggctcatggcgctgtcctgcaagctgctgggggtgctgtcggaggccatgggcctggagacggaggccctgtccaaggcgtgcgtggacatggaccagaaggtggtggtcaacttctaccccaagtgcccccagcccgacctcaccctcggcctcaagcgccacaccgaccccggcaccatcaccctcctcctccaggacctcgtcggcggactccaggccacccgcgacggcggcaacacctggatcaccgtacagcccatcgccggcgcattcgtcgtcaacctcggcgaccacggccactacttgagcaacgggaggtttaagaacgcggaccaccaggcggtggtgaacggggagagcagcaggctgtccatcgccacgttccagaacccggcgcccgacgccaaggtgtggccgctggcggtgagggagggggaggacaccatcctggaggagcccatcaccttcaccgagatgtaccgccgcaagatggcgcgcgacctcgagctcgccaagcgcaagaagcaggccaaggccgatcagctcaagcagcagctgcagcaggaggccgcgcccgccgccgcgcccaccaagccactcaaccagattcttgcctagattccatgccgattcattcatgcgtgatatatagtactatgtactatatcgtattaaaataagtaattatctctatctactcatttgtgtgtaattaagagatgagtaattatctagtatatacacatttgtctgcgaggagcgagctggacctgtaataacatgtagcatgtcctacgtggaaccgatcagctgattggagctgtcacatgagtttgctgtgtgcagaaattgaacgcattcggtactgctttcaaaaaaaaaa

SEQ ID NO: 62 - DNA, 1320 bp, Festuca arundinacea
gaaacggccctgcactagacgaaccagacaaacgactccatcccacagacgactcgccggccgccacgcccacgcaccactttacggggccgatcggatcggatggcgtcggtggagaacgcgccgttcctgccgacggcggcgacgggcgaggccacgctgcggccgtccttcgtgcgggacgaggacgagcgacccaaggtggcgcacgaccgcttcagcgacgaggtgccggtcatctcgctccacggcatcgatgatggcggcgcgcggagggccgagatccgggaccgcgtggcggcggcgtgcgaagggtggggcgtcttccaggtcgtcgaccacggcgtcgacgccgccctcgtcgccgagatggccaggctctcccgcgagttcttcgcactccccgccgaggacaagctccgctacgacatgtccggcggcaagaaaggtggattcatcgtctccagccacctccagggcgagacggtccaggactggcgggagatcgtgacctacttctcgtacccggtgaaggcgcgggactacgggcggtggccggagaagcctgcggggtggcgcgcggtggtggagcagtacagcgagcggctcatggcgctgtcgtgcaagctgctgggggtgctgtcggaagccatgggcctggagacggaggccctgtccaaggcgtgcgtggacatggaccagaaggtggtggtcaacttctaccccaagtgcccccagcccgacctcaccctcgggctcaagcgccacaccgaccccggcaccatcaccctcctcctccaggacctcgtcggcggactccaggccactcgcgacggcggcaacacctggatcaccgtgcagcccgtccccggcgccttcgtcgtcaacctcggcgaccacggccactacttgagcaacgggaggtttaagaacgcggaccaccaggcggtggtcaacggggagagcagcaggctgtccatcgccacgttccagaacccggcgccagaagcgaaggtgtggccgctggcggtaagggagggggaggacaccatactggaggagcccatcaccttcaccgagatgtaccgccgcaagatggcgtgcgacctcgagctcgccaagcgcaagaagcaggccaaggccgaccagctcaagcagcagctgcagcaggagcagcaggaggcggtggccgccgccgcgcccaagcccgccaccaccaagcccctcaaccagattcttgcctagattccatgtatatgtatatcgtattaaaataagaaattatctatatatatatatatatatataaaaaaaaaaaaa

SEQ ID NO: 63 - protein, 654 aa, Lolium perenne
MESSAVVPGTTAPLLPYAYAPLPSSSDDARENRSSGGVRWRACAVVLADSALAVVVVVGLLAGGRVDRVPAGADVASATVPAVPMEFPRSRGKDLGVSEKSSGAYSADGGFPWSNAMLQWQRTGFHFQPEQHYMNDPNGPVYYGGWYHLFYQHNPKGDSWGNIAWAHAVSKDMVNWRHLPLAMVPDQWYDSNGVLTGSITVLPDGQVILLYTGNTDTLAQVQCLATPADPSDPLLREWIKHPANPILFPPPGIGLKDFRDPLTAWFDHSDHTWRTVIGSKDDDGHAGIILSYKTKDFVNYELMPGNMHRGPDGTGMYECIDLYPVGGNSSEMLGGDDSPDVLFVLKESSDDERHDYYALGRFDAVANVWTPIDRDLDLGIGLRYDWGKYYASKSFYDQKKNRRIVWAYIGETDSEQADITKGWANLMTIPRTVELDRKTRTNLIQWPVEEVDTLRRNSTDLGRITVNAGSVIRLPLHQGAQLDIEASFQLNSSDVDAINEADVGYNCSTSGAAVRGALGPFGLLVLANGRTEQTAVYFYVSKGVDGGLQTHFCHDESRSTRAKDVVNRMIGSIVPVLDGETFSVRVLVDHSIVQSFAMGGRITATSRAYPTETIYAAAGVYLFNNATGATVTAERLVVHEMASADNHIFTNDDL

SEQ ID NO: 64 - protein, 648 aa, Festuca arundinacea
MESSAVVPGTTARLLPYAYAPLPSSADDARENQGSDGVRWRACAAVLAASALAVLVVVGLLAGGRVDRPGPAAVPAVPTEIPRSRGKDFGVSEKSSGAYSADGGFPWSNAMLQWQRTGFHFQPEQHYMNDPNGPVYYGGWYHLFYQYNPKGDSWGNIAWAHAVSKDMVNWRHLPLAMVPDQWYDSNGVLTGSITVLPDGRVILLYTGNTDTLAQVQCLAEPADPSDPLLREWIKHPANPILFPPPGIGLKDFRDPLTDWFDHSDDTWRTVIGSKDDDGHAGIILSYKTKDFVNYELMPGNMHRGPDGTGMYECIDLYPVGGNSSEMLGGDDSPDVLFVLKESSDDERHDYYALGRFDAAANIWTPIDQELDLGIGLRYDWGKYYASKSFYDQRKNRRVVWAYIGETDSEQADITKGWANLMTIPRTVELDKKTRTNLIQWPVEEVDTLRRNSTDLGRITVNAGSVIRLPLHQGAQLDIEASFQLNSSDVDALNEADVGYNCSTSGAAVRGALGPFGLLVLANGRTEQTAVYFYVSKGVDGALQTHFCHDESRSTRAKDVVNRMIGSIVPVLDGETFSVRVLLDHSIVQSFAMGGRITATSRAYPTEAIYAAAGVYVFNNATGATVTAERLVVYEMASADNHIFRNDDL

SEQ ID NO: 65 - protein, 620 aa, Festuca arundinacea
MESRAFPNAAYAPLLPPTADDATLGKQDRPGVGWRGFLTVLAASGVVVLLVAATMLAGSRMGQAGDTDEDGAGGFPWSNEMLQWQRAGFHYQPEGHFMSDPDGPVYYRGYYHLFFQYNRRGVAWDDYIEWGHVVSQDLVHWRPLPLALRPDHWYDKKGVLSGTITVLHNGTLVLLYTGVTEDPMAESQCIAVPTDPNDPLLRHWTKHPANPVLAHPQGVQGMDFRDPTSAWFDKSDATWRILIGSKDDDNGSHAGIAFIFKTKDFLSFERVPGIVHRVEGTGMWECIDFYPVGGGHNSSSEELYVIKASMDDERHDYYSLGRYDAAANTWTPLDAELDLGIGLRYDWGKLYAATSFYDPLKQRRIMLGYVGETDSARADVAKGWASLQSIPRTVTLDEKTRTNLLLWPVEEVEALRYNSTDLSGITVDNGSVFHLPLHQATHLDIEASFRLDASDVAAINEADVGYNCSSSGGAAARGAIGPFGLLVHAAGDLRGEQTAVYFYVSRALDGTLRTSFCNDETRSSRARDVTKRVVGSTVPVLHGEALSMRVLVDHSIVQSFAMGGRVTATSRVYPTEAIYARAGVYLFNNATGASVTAERLIVHEMASAVYDETLIMVEDS

SEQ ID NO: 66 - protein, 623 aa, Lolium perenne
MESRAFPSAAYAPLLPSAADDVALAKQDRPGVGWRGFLTVLAACGVVVLLVGATLLAGSRMGQAGDGEGNTDEDGAGGFPWSNEMLQWQRAGFHYQPEGHFMSDPNGPVYYRGYYHLFFQYNRRGVAWDDYIEWGHVVSQDLVHWRPLPLAMRPDHWYDKKGVLSGTITVLHNGTLVLLYTGVTEDPMAESQCIAVPTDPNDPLLRHWTKHPANPVLAHPQGVQGMDFRDPTSAWWDKSDATWRILIGSKDDDNGSHAGIAFIFKTKDFLSFERVPGIVHRVEGTGMWECIDFYPVGGGHNSSSEELYVIKASMDDERHDYYSLGRYDAAANTWTPLDAELDLGIGLRYDWGKLYASTSFYDPVKQRRIMLGYVGEVDSARADVAKGWASLQSIPRTVALDEKTRTNLLLWPVEEVEALRYNSTDLSGITIDNGSVFHLPLHQTTQLDIEASFRLDASDVAAINEADVGYNCSSSGGAAARGALGPFGLLVHAAGDLRGEQTAVYFYVSRALDGTLRTSFCNDETRSSRARDVTKRVVGSTVPVLDGEALSMRVLVDHSIVQSFAMGGRTTATSRVYPTEAIYARAGVYLFNNATGAGVTAERLIVHEMASAVYDETLMVEDS

SEQ ID NO: 67 - protein, 623 aa, Festuca arundinacea
MESRAFPSAAYAPLLPPTADDATLGKQDRPGVGWRGFLTVLAASGVVVLLVAASLLAGSRMGQAGDGEGNTDEDGAGGFPWSNEMLQWQRAGFHYQPEGHFMSDPDGPVYYRGYYHLFFQYNRRGVAWDDYIEWGHVVSQDLVHWRPLPVAMRPDHWYDKKGVLSGTITVLHNGTLVLLYTGVTEDPMAESQCIAVPTDPNNPLLRHWTKHPANPVLAHPQGVQGMDFRDPTSAWFDKSDATWRILIGSKDDDNGSHAGIAFIFKTKDFLSFERVPGIVHRVEGTGMWECIDFYPVGGGHNSSSEELYVIKASMDDERHDYYSLGRYDAAANTWTPLDAELDLGIGLRYDWGKLYAATSFYDPLKQRRIMLGYVGETDSARADVAKGWASLQSIPRTVTLDEKTRTNLLLWPVEEVEALRYNSTDLSGITIDNGSVFHLPLHQATQLDIEASFRLDASDVAAINEADVGYNCSSSGGAAARGAIGPFGLLVHAAGDLRGEQTAVYFYVSRALDGTLRTSFCNDETRSSRARDVTKRVVGSTVPVLDGEALSMRVLVDHSIVQSFAMGGRVTATSRVYPTEAIYARAGVYLFNNATGASVTAERLIVHEMASAVYDETLMVQDS

SEQ ID NO: 68 - protein, 619 aa, Lolium perenne
MESRDFPSAAYAPLLPSAADDVALAKQDRPGVGWRGFLTVLAACGVVVLLVAASLLAGSRMGQAGDTDEDGAGGFPWSNEMLQWQRAGFHYQPEGHFMSDPDGPVYYRGYYHLFFQYNRRGVAWDDYIEWGHVVSQDLVHWRPLPLAMRPDHWYDKKGVLSGTITVLHNGTLVLLYTGVTEDPMAESQCIAVPTDPNDPLLRHWTKHPANPVLAHPQGVQGMDFRDPTSAWWDKSDSTWRILIGSKDDDNGSHAGIAFIFKTKDFLIFERVPGIVHRVEGTGMWECIDFYPVGGGHNSSSEELYVIKASMDDERHDYYSLGRYDAAANTWTPLDAELDLGIGLRYDWGKLYASTSFYDPLKQRRIMLGYVGDVDSARADVAKGWASLQSIPRTVALDEKTRTNLLLWPVEEVEALRYNSTDLSGITVENGSIFHLPLHQATQLDIEASFRLDASDVAAINEADVGYNCSSSGGAAARGALGPFGLLVHAAGDLRGEQTAVYFYVSRALDGSLRTSFCNDETRSSRARDVAKRVVGSTVPVLDGEVLAMRVLVDHSIVQSFAMGGRVTATSRVYPTEAIYARAGVYLFNNATGASVTAERLIVHEMASAVYDETVMVKDS

SEQ ID NO: 69 - protein, 422 aa, Festuca arundinacea
MDKLNGSARLMIVSDLDHTMVDHHDEENLSLLRFGALWESAYCQDSLLVFSTGRSPTLYKELRKEKPMLTPDITIMSVGSEITYGEAMVPDDGWEEYLNNKWDRNIVLEETAKYSELKLQPETEQRPHKVSFLVDKKSAQEVIKSLSEKFEKRGVDAKIIYSGGQDLDILAQGAGKGQALAYLLKKFASCGKTPNNTLVCGDSGNDAELFSIPGVHGVMVSNAQEELLQWHAENAKDNPKVIHATERCAAGIIQAIGHFKLGPNISPRDIEFPYVKEDSFKPTAAVVKFYVLCEKWRRADVPKADSVIEYFKNITDASGVIIHPSGLELSIHSSIDALASCYGDKQGKKYRSWVDRLVISQTASDSWLVRFDLWEAEGDAWVCCLTTLALNVKPETPGGFVVTHIHKTWLKEYSGDEQASKL

SEQ ID NO: 70 - protein, 422 aa, Lolium perenne
MDKLNGSARLMIVSDLDHTMVDHHDEENLSLLRFGALWESTYCQDSLLVFSTGRSPTLYKELRKEKPMLTPDITIMSVGSEITYGEAMVPDDGWEEYLNNKWDKSIVLEETAKFSELKLQAETEQRPHKVSFLVDKKTAQEVIKSLSEKFEKRGVDAKIIYSGGQDLDILAQGAGKGQALAYLLKKFASCGKTPNNTLVCGDSGNDAELFSIPGVHGVMVSNAQEELLQWRAENAKDNPKVIHATERCAAGIIQAIGHFKLGPNVSPRDVEFPYVKEDSFKPTAAVVKFYVLCEKWRRADVPKTDSVIEYFKNITDASGVIIHPSGLELSIHSSIDALASCYGDKQGKKYRSWVDRLVISQTASDSWLVRFDLWEAEGDKWVCCLTTLALNVKPETPGGFVVTHIHKTWLKEYSGDEQASKL

SEQ ID NO: 71 - protein, 1062 aa, Festuca arundinacea
MAAGNEWINGYLEAILDAGSKLRPQGVQLPPLETAPALAAEESGAAYNPTRYFVEEVVRSFDEQALHKTWTKVVAMRNSQERSNRLENLCWRIWNVSRQKKQVEWDYTKEVARRKLEQELGSREAAEDLSELSEGEKDTTTAKPDAATAQPSTDDGEHQQPQPRTRLARINSEVRLVSDDEEEQTKKRNLYIVLISIHGLVRGENMELGRDSDTGGQVKYVVELARALAATAGVHRVDLLTRQISCPDVDWTYGEPVEMLERLSSADADEDDGEQSGGGAYIVRLPCGPRDQYIPKEELWPHIPEFVDRALSHVTEVARALGDQLQPPPTPAAGDGAALVAAPIWPYVIHGHYADAAEVAANLASALNVPMVMTGHSLGRNKLEQLLKLGRMPGPEIQGTYKIARRIEAEETGLDTAEMVVTSTKQEIEEQWGLYDGFDLMVERKLRVRQRRGVSSLGRYMPRMAVIPPGMDFSFVETQDTAEGDGADLQMLIAPDKAKKALPPIWSDVLRFFTNPHKPMILALSRPDPKKNVTTLLKAYGESRQLRELANLTLILGNRDDIEDMAGGGGAVLTAVLKLIDRYDLYGQVAYPKHHKQTDVPHIYRLAAKTKGVFTNPALVEPFGLTIIEAAAYGLPVVATKNGGPVDILKALNNGLLVDPHSAEAITGALLSLLAEKSRWVECRRNGLRNIHRFSWPHHCRLYLSHVSTYCDQPSPHQPLRVPLGLGSSTSFGADDSLSDSLRGLSLQISVDASSDLNAADSAAAIMDALRRRPASEKPASSGARALGFAPGRRESLLVVAVDCYGDDGKPDVKQLKKAIDAAVSVGECAGAKQGYVLSTGMTIPEAAEAIKACGADVASFDALICSSGAELCYPWKELAADEEYSGHVAFRWPGDHVKSAVPRLGSLEEIALAIDRPACSVHCHAYAATDASKVKKVDSIRKSLRMRGFRCNLVYTRACTRLNVIPLSASRPRALRYLSIQWGIDLSKVAVLVGETGDTDRERLLPGVHKTLILPGMVARGSEELLRGDDGYTMADVVAMDSPNIVTLAEGQSASDLLKAI

SEQ ID NO: 72 - protein, 1074 aa, Lolium perenne
MAGNDWINSYLEAILDAGGTAGDISAASVAGGDDGPGAGGGTAGEKRDKSSLMLRERGRFNPARYFVEEVISGFDETDLYKTWVRTSAMRSPQERNTRLENMSWRIWNLARKKKQIEGEEASRLSKKRLEREKARRDAAADLSEDLSEGEKGENINGSSVHDESTRGRMPRIGSTDAIEVWANQHKDKKLYIVLISIHGLIRGENMELGRDSDTGGQVKYVVELARALGETPGVYRVDLLTRQISAPDVDWSYGEPTEMLSPRNSENLGDDMGESSGAYIVRIPFGPREKYIPKEQLWPHIQEFVDGALVHIMQMSKVLGEQVGRERRVWPVVIHGHYADAGDSAALLSGALNVPMVFTGHSLGRDKLEQLLKQGRQTRDEVNATYKIMRRIEAEELCLDASEIVITSTRQEIEKQWGLYNGFDVTMERKLRARTKRGVSCYGRYMPRMIAIPPGMEFSHIVPHDVDLDGDEANEVGSGSPDPPIWADIMRFFSNPRKPMILALARPDPKKNITTLVKAFGEHPGLRNLANLTLIMGNRDVIDEMSSTNGAVLTSVLKLIDKYDLYGQVAYPKHHKQSEVPDIYRLAARTKGVFINCAYIEPFGLTLIEAAAYGLPMVATQNGGPVDIHRVLDNGILVDPHNQNDIAEALYKLVSDKHLWAQCRQNGLDNIHRFSWPEHCKNYLSRVGTVKPRHPRWQRSDDATEVSESDSPGDSLRDVHDISLNLKLSLDSEKAGTKINTERNSTNARRNLEDAVLKFSNAVSEGTKDESDENAEATTGSINGHLYGEKHIVVIAVDSVQNADLVQIIKNLFEASRKEKSSGAVGFVLSTSRAISETLTFLTSGGIQTTEFDAFICSSGSDLCYPSSSSEDMLSPTELPFMIDLDYHSQIEYRWGGEGLRKTLIRWAAENNSQSGQEVVTEDEECSSTYCISFKVKNTEAVPPVKDLRKTMRIQALRCHVLYSHDGSKLNLIPLLASRSQALRYLYIRWGVELANMTVVVGESGDTDYEGLLGGVHKTIILKGSFNAAPNQLHAARSYSLEDVISFDKPGIASVEGYLPDSLKSALQQFGVLN

SEQ ID NO: 73 - protein, 937 aa, Lolium perenne
MAAGNEWINGYLEAILDAGSKLRPQGVQLPPLETAPALAAEESSAAYNPTRYFVEEVVRSFDEQALHKTWTKVVAMRNSQERSNRLENLCWRIWNVSRQKKQVEWDYTKEVARRKLEQELGSREAAEDLSELSEGEKDTTTAKPDAAAAQPSADDGEHQQPQPRTRLARINSEVRLVSDDEEEQTKKRNLYIVLISIHGLVRGENMELGRDSDTGGQVKYVVELARALAATAGVHRVDLLTRQISCPDVDWTYGEPVEMLERLSSADADDDDGEQAGGGAYIVRLPCGPRDQYIPKEELWPHIPEFVDRALSHVTEVARALGEQLQPPPSPADGAVAAPIWPYVIHGHYADAAEVAANLASALNVPMVMTGHSLGRNKLEQLLKLGRMPGPEIQGTYKIARRIEAEETGLDTAEMVVTSTKQEIEEQWGLYDGFDLMVERKLRVRQRRGVSSLGRYMPRMAVIPPGMDFSFVETQDTADGTGRSQMLIAPDKAKKALPPIWSDVLRFFTNPHKPMILALSRPDPKKNVTTLLKAYGESRQLRELANLTLILGNRDDIEDMAGGGGAVLTAVLKLIDRYDLYGQVAYPKHHKQTDVPHIYRLAAKTKGVFINPALVEPFGLTIIEAAAYGLPVVATKNGGPVDILKALHNGLLVDPHSAEAITGALLSLLAEKSRWVECRRNGLRNIHRFSWPHHCRLYLSHVSTYCDQPSPHQPLRVPLALGSSTSFGADDSLSDSLRGLSLQISVDASSDLNAADSAAAIMDALRRRPASEKPASSGARALGFAPGRRESLLVVAVDCYGDDGKPDVEQLKKAIDAAVSVGECAGAKQGYVLSTGMTIPEAAEAIKACGADVASFDALICSSGAELCYPWKKLVADEEYSGHVAFRWPGDHVKSAVPRLGSMEEIALAIDRPASSVHCHAYAATDASKVSITEHYL

SEQ ID NO: 74 - protein, 808 aa, Lolium perenne
MAAKLTRLHSLRERLGATFSSHPNELIALFSKYVHQGKGMLQRHQLLTEFEALFEADKERYAPFEDILRAAQEAIVLPPWVALAIRPRPGVWDYIRVNVSELAVEELTVSEYLAFKEQLVDEHASSKFVLELDFEPFNASFPRPSMSKSIGNGVQFLNRHLSSKLFQDKESLYPLLNFLKAHNHQGTTMMLNDRIQSLRGLQSALRKAEEYLTSIPEDTPSSEFNHRFQELGLEKGWGDTAKRVQDTIHLLLDLLEAPDPASLEKFLGTIPMMFNVVILSPHGYFAQSNVLGYPDTGGQVVYILDQVRALENEMLLRIKQQGLDITPKILIVTRLLPDAVGTTCGQRLEKVIGTEHTDILRVPFRTEKGILRKWISRFDVWPYLETYTEDVANELMREMQTKPDLIIGNYSDGNLVATLLAHKLGVTQCTIAHALEKTKYPNSDIYLDKFDSQYHFSCQFTADLIAMNHTDFIITSTFQEIAGSKDSVGQYESHIAFTLPDLYRVVHGIDVFDPKFNIVSPGADMTVYFPYTETDKRLTAFHPEIEELLYSDVENSEHKFVLKDKNKPIIFSMARLDRVKNMTGLVEMFGKNAHLKDLANLVIVAGDHGKESKDREEQAEFKRMYSLIEEYKLEGHIRWISAQMNRVRNAELYRYICDTKGAFVQPAFYEAFGLTVVEAMTCGLPTIATCHGGPAEIIVNGVSGLHIDPYHSDKAADILVNFFEKSTADPTYWDKMSEGGLKRIYEKYTWKLYSERLMTLTGVYGFWKYVSNLERRETRRYLEMFYALKYRSLAAAVPLAVDGENTDN

SEQ ID NO: 75 - protein, 808 aa, Festuca arundinacea
MAAKLTRLHSLRERLGATFSSHPNELIALFSKYVHQGKGMLQRHQLLTEFEALFESDKERYAPFQDILRAAQEAIVLPPWVALAIRPRPGVWDYIRVNVSELAVEELTVSEYLAFKEQLVDEHASSKFVLELDFEPFNASFPRPSMSKSIGNGVQFLNRHLSSKLFQDKESLYPLLNFLKAHNHKGTTMMLNDRITSLRGLQSALRKAEEYLTSILEDTPSFEFNHRFQELGLEKGWGDTAKRVQDTIHLLLDLLEAPDPASLEKFLGTIPMMFNVVILSPHGYFAQSNVLGYPDTGGQVVYILDQVRALENEMLLRIKQQGLDITPKILIVTRLLPDAVGTTCGQRLEKVIGTEHTDILRVPFRTEKGILRKWISRFDVWPYLETYTEDVANELMREMQTKPDLIIGNYSDGNLVATLLAHKLGVTQCTIAHALEKTKYPNSDIYLDKFDSQYHFSCQFTADLIAMNHTDFIITSTFQEIAGSKDSVGQYESHIAFTLPDLYRVVHGIDVFDPKFNIVSPGADMSVYFPYTETDKRLTAFHPEIEELLYSDVENSEHKFVLKDKNKPIIFSMARLDRVKNMTGLVEMFGKNAHLKDLANLVIVAGDHGKESKDREEQAEFKRMYSLIEEYKLKGHIRWISAQMNRVRNAELYRYICDTKGAFVQPAFYEAFGLTVIEAMTCGLPTIATCHGGPAEIIVDGVSGLHIDPYHSDKAADILVNFFEKSTADPTYWDKMSEGGLKRIYEKYTWKLYSERLMTLTGVYGFWKYVSNLERRETRRYLEMFYALKYRSLAAAVPLAVDGENTDS

SEQ ID NO: 76 - protein, 814 aa, Lolium perenne
MGEAAGDRVLSRLHSVRERIGDSLSAHPNELVAVFTRLVNLGKGMLQPHQIIAEYNTAIPEAEREKLKDGAFEDVLRAAQEAIVISPWVALAIRPRPGVWEYVRVNVSELAVEELSVPEYLQFKEQLVEGSNKDFVLELDFEPFNASFPRPSLSKSIGNGVQFLNRHLSSKLFHDKESMYPLLNFLRAHNYKGMPMMMNDRVRSLSALQGALRKAEEHLSGLPADTPYSDFHHRFQELGLEKGWGDCAKRAQETLHLLLDLLEAPDPSTLEKFLGTIPMVFNVVILSPHGYFAQANVLGYPDTGGQVVYILDQVRAMENEMLLRIKQQGLDITPRILIVTRLLPDATGTTCGQRLEKVLGTEHTHILRVPFRTENGIVRKWISRFEVWPYLETFTDDVAHEISGELQANPDLIIGNYSDGNLVACLLAHKMGVTHCTIAHALEKTKYPNSDLYWKKFEDHYHFSCQFTTDLIAMNHADFIITSTFQEIAGNKDTVGQYESHMAFTMPGMYRVVHGIDVFDPKFNIVSPGADMSIYFPYSESQRRLTSLHPEIEELLYSDVDNDEHSCLKDRNKPIIFSMARLDRVKNLTGLVELYGRNPRLQELVNLVVVCGDHGNPSKDKEEQAEFKKMFDLIEQYNLNGHIRWISAQMNRVRNAELYRYICDTKGAFVQPAFYEAFGLTVIEAMTCGLPTFATAYGGPAEIIVNGVSGYHIDPYQGDKASALLVEFFEKCQGDHSHWTKISLGGLQRIEEKYTWKLYSERLMTLTGVYGFWKYVSNLERRETRRYLEMLYALKYRTMASTVPLAVEGEPSSK

SEQ ID NO: 77 - protein, 816 aa, Festuca arundinacea
MGESAGERALSRLHSVRERIGDSLSAHTNELVAVFSRLVNHGKGMLQPHQITAEYNAAIPEAEREKLKDTAFEDLLRGAQEAIVIPPWVALAIRPRPGVWEYVRVNVSELGVEELSVPEYLQFKEQLVNESTDNNFVLELDFGPFNASFPRPSLSKSIGNGVQFLNRHLSSKLFHDKESMYPLLNFLRAHNYKGMTMMLNDRIRSLSALQDALRKAEKHLSGLPADTPYSEFHHRFQELGLEKGWGDCTQRAHETIHLLLDLLEAPDPSTLEKFLGTIPMVFNVVILSPHGYFAQANVLGYPDTGGQVVYILDQVRAMENEMLLRIKQQGLDITPKILIVTRLLPDAHGTTCGQRLEKVLGTEHTHILRVPFKTEDGIVRKWISRFEVWPYLEAYTDDVAHEIAGELQANPDLIIGNYSDGNLVACLLAHKLGVTHCTIAHALEKTKYPNSDLYWKKFEDHYHFSCQFTADLIAMNHADFIITSTFQEIAGNKDTVGQYESHMAFTMPGLYRVVHGIDVFDPKFNIVSPGADMTIYFPYTEQQKRLTSLHAEIEELLFSDVENSEHKFVLKDKNKPIIFSMARLDRVKNMTGLVELYGRNPRLQELVNLVVVCGDHGKESKDKEEQAEFKRMFDLIEQYNLSSHIRWISAQMNRVRNGELYRYICDMKGAFVQPAFYEAFGLTVIEAMTCGLPTFATAYGGPAEIIVNGVSGYHIDPYQNDKASALLVEFFEKCQEDPSHWNKISQGGLQRIEEKYTWKLYSERLMTLSGVYGFWKYVSNLDRRETRRYLEMLYALKYRKMATTVPLAIEGETTGK

SEQ ID NO: 78 - protein, 478 aa, Festuca arundinacea
WIILEPAIEPDTPGDIKGCWSASATVISGSQPVIMYTGGDVENHQVQNIALPKNRSDPYLIEWTKACNNPVLQPVGPGMNPGEFRDPTTGWIGPDGLWRISIGAEVNGYSAALLYKSEDFLNWSRVDHPLYSSSASTMWECLDFFAVLPGSNGGLDLSAAIPKGAKHVLKVSVDQCDKYMIGVYDLEHDAFVPDTILDDRWLLPRIDYGNYYASKSFFDSKNRRRIIWGWTNESDSSSDDVAKGWAGIYAIPRTIWLDRDGKQLLQWPVEEIESLRRNEINYQGLDLEKGDLYEIKGVDTLQADVEIDFELTSIDDADSFDPSWLLDPEKHCREAGASVHGGIGPFGLVILATGDMEEHTVVHFRVYKSQKEYMILMCSDIRRSSLRQGLYAPAYGGFFEFDLEKERKISLRTLIDRSAVESFGGGGRVCIIARVYPVAIVDDGSAHMYAFNNGSTTVRVPQIRAWSMMTAQVNLKKG

SEQ ID NO: 79 - protein, 583 aa, Lolium perenne
MGNPKWVLAPWAVLLLLQLASASHHARLSLETSAASPSVPASIVSPLLRTGYHFQPPMNWINDPNGPLYYKGWYHLFYQYNPKGAVWGNIIWAHSVSRDLINWIALEPAISPTIPTDQYGVWSGSTTILHDGTPAILYTGIDRPSVNYQIQNIALPKNASDPLLREWYKPGYNPIAVPVEGINATQFRDPTTAWFAGRHWRMLVGGLRPGTLRGEAILYRSRDFKHWVRAKHPLHSALTGMWECPDFFPVGKAGVEKGLDTSEYGAAAGVEKHVLKNSLDLTRYDYYTIGTYDNVKERYVPDNPTGDVYQRLQYDYGNFYASKTFFDPVKQRRILLGWANESDSVAHDKAKGWAGIQAIPRKIWLDPSGKQLVQWPVEELEKLRGKPVNVGDKVVKPGQHFEVTGLQSYQSDVEVSFEVSSLDKAEPFDPAYSNDAQKLCGIKGADVKGGVGPFGLWVLSSADLAEKTAVFFRVFKDGYGKPIVLMCSDPTKSSLTPDLYKPTFAGFVDTDISSGKISLRSLIDRSVVESFGAGGKTCILSRVYPSMALGKDAHLHVFNNGETDIKVSKLTAWEMKRPLMNGA

SEQ ID NO: 80 - protein, 390 aa, Lolium perenne
GVGSLLVYRSADFLRWQRNAAPLHASSRDVPVLECPDLFPVAAAAQGATEGLETSAPSGAGVRHVLKLTDFAKEDHYMVGFYDDVADTFVPAEPERGDDPDNWRRLDHGHLYASKSFYDARNKRRILWAWVDETDGGGVARGWAGIQAFPRAMWLDADGKRLVQWPVEEIETLRRKRVGLRWATDVEAGGRKEIAGIVSSQADVEVVFEIPNLEEAETLDPEWVLDPKGLCAAKGASVHGGVGPFGLLVLASGDLEEHTAVFFRVFKHDGKYKVLMCTDLTKSSTKAGAHKPSYGAFLDVDVEKDKFISLRTLIDHTVVESFGDGGRTCMTARVYPEHAAMGSTHLYVFNNGTGAVKVSKLEAWELATAAVNGGSLAPVVVKASDPKEAL

SEQ ID NO: 81 - protein, 597 aa, Festuca arundinacea
MAGLRLAACAAVAVLLCLLLSSSAALRWLSDPAPESAAAGVSHDSYRTAYHFQPTENWQNDPNGPMYYKGVYHFFYQYNPYRATWGNGNLSWGHSVSVDLVNWSALENAMDPDSSFDINGCWSGSATILPDGTPVFLYTGIDADNNQVQNVAFPKNASDPLLREWVKPSYNPVIALPDDVVHDNFRDPSTAWLGRDGLWRVAVSAGLKDGTGTTLVYRSKDFRQWERNAEPLYSSSDAGMVECPDLFPLAEPGDQHGLDYTPSNGAAVSYVLKQSVMDTLSDYYVLGRYDDAADTFSPVEADNDCRTWQRFDYGHVYASKSFYDAGKKRRVLWSWANESDPEADYLARGWAGVQAVPRRIWLDSKGKQLLQWPIEEIETLRKTRVGLLGAEMNAGGMNEIIGVAGAQADVEVVFEVPSLEGAENLDPNQLLDPQRLCGEKGASVLGGVGPFGLLVLASGDLQEHTSVFFRVFRHEGKYKVLMCTDLRRSTTRADVYKPPYGGFVDIDIEKERSISLRTLVDHSVVESYGGGGRTVITARVYPEHAATTNSRLFMFNNGTGAVKVSKLDAWELAPAKVNVPGDGLITAGSSMHLREAY

SEQ ID NO: 82 - protein, 399 aa, Festuca arundinacea
LNSTEFRDPTTGWIGPDGLWRIAIGAELNGYGAALLYKSEDFLNWTRVDHPLYSDNAPSMWECPDFFAVLPGNNGGLDLSAAIPKGAKHVLKMSVDYSDKYMIGVYDLKRDAFVPDVVLDDRRLWLRIDYGTFYASKSFFDSKRGRRVIWGWSNETDSVSDDGAKGWAGIHAIPRSIWLDSDGKQLLQWPIDEIESLRRDEINHQGLELKNGDLFEIKGIDTLQADIEVDFELTSIDSADPFDPSWLLDVERHCREAGASVQGGIGPFGLVVLASDNMEEHIAVHFRVYKSQKSHMILMCSDLRRSSLRSGLYTPAYGGFFEFDLEKERKISLRTLIDRSAVESFGGGGRVCITARIYPVALVDGRVHMYAFNNGSTTVRVPQLGAWSMMTAQVNVNKG

SEQ ID NO: 83 - protein, 583 aa, Festuca arundinacea
MGNPKWIFAPWAVLLLFLLQLACASHHTRRSLETEAASPSVPASIVSPLLRTGYHFQPPMNWINDPNGPLYYKGWYHLFYQYNPKGAVWGNIIWAHSVSRDLINWIALEPAITPSIPTDKYGVWSGSTTILHDGTPAILYTGIDRPSINYQIQNIALPKNASDPLLREWYKPGYNPIAVPVAGMNATQFRDPTTAWFAGRHWRMLVGGLRPGTLRGEAILYRSLDFKNWTRAHHPLHSALTGMWECPDFFPVGEAGVEKGLDTSEHGEGVEKHVLKNSLDLTRYDYYTVGTYDNVKERYVPDNPTGDVYRRLQYDYGNFYASKTFFDPVKQRRILLGWANESDSVAHDKAKGWAGIQAIPRKIWLDPSGKQLVQWPVEELEKLRGKPVTVGDKVVKPGQHFEVTGLQSYQSDVEVSFEVSSLDKAEPFDPAYSNDAQKLCGIKGADANGGVGPFGLVVLASADLAEKTAVFFRVFKDGYGKPIVLMCSDPTKSSLTPDLYKPTFAGFVDTDISSGKISLRSLIDRSVVESFGAGGKTCILSRVYPSMALGKNAHLHVFNNGETDIKVSKLTVWEMKRPLMNGA

SEQ ID NO: 84 - protein, 346 aa, Lolium perenne
MYYNGIYHEFYQYNPNGSLWGNIIWGHSVSTDLINWIPVEPAIERDIPSDINGCWTGSATIISGDQPIIIYTGADKENRQLQNIVLPKNKSDPYLREWTKAGNNPVIQPVGPGLNASQFRDPTTGWIGPDGLWRIAVGAELNGYGAALLYKSQDFLNWTRVDHPLYSSNASSMWECPDFFAVLPGNSGGLDLSAEIPNGAKHVLKMSLDSCDKYMIGVYDLKSDTFMPDSVLDDRRLWSRIDHGNFYASKSFFDSKKGRRIIWGWTNETDSSSDDVAKGWAGIHAIPRTIWLDSYGKQLLQWPIEEIESLRRNEISHQGLELKKGDLFEIKGTDTSQVVHVFLGKL

SEQ ID NO: 85 - protein, 581 aa, Festuca arundinacea
MAGLRLAAVAFHLCLLLSPSSSLRRLYHEDDEAESTPGHGGSRTAYHFQPAKNWQNDPNGPMYHNGLYHLFYQYNPRGATWGNGNLSWGHSVSVDLVNWAALDTALDPDSPFDANGCWSGSATILPDGQPAILYTGIDAAGNQVQNVAFPKKASDPLLREWVKPDYNPVIPLPKDVVHDSFRDPSTAWRGRDGLWRVAIAAKVNVTVTVGSTLIYRSKDFRRWERNAAPLYESLAAGMVECPDLFPVAKPGAQNGLDYAPSSRAARHVLKLSVVATLQDYYVVGLYDDTADTFNAAAGADNDWRTWRRIDYGHVYASKSFFDARKNRRVLWCWANESDTEADYIARGWSGVQTVPRKIWLDIDGKQLLQWPIKEIETLRKKRVGLLGTEMNSGGLNEIIGVAGSQADVEVVFKIPTLEGAENIEPNELLDPQKLCGNNGASMRGSIGPFGLLLLASGDLLEHTSVFFRVFKHGAKYKVLMCTDLTRSTTRSDVYKPSYGGFVDMDIDKTKSISLRTLIDHSVVESFGGGGRTCITARVYPEHAEMSNSHIYMFNNGTGAVKVAKLEAWELATANVNVAGHG

SEQ ID NO: 86 - protein, 588 aa, Lolium perenne
MGVRLGRVAWACPAVLVLLLQLAGASHVVYETSLLETEAAAATVPASIFELSTGYHFRPQKNWINDPNAPLYYKGWYHLFFQYNPKGAVWGNIVWAHSVSRDLINWVALETALAPSIDADKYGCWSGSATIMPDGTPVIMYTGVSRPDVNYEVQNVAFPKNSSDPLLREWVKPAHNPVIVPEGGINATQFRDPTTAWYADGHWRILVGALSGASRGVAYVYRSRDFRRWTRVRKPLHSAPTGMWECPDFYPVTVDGKESGVDTSVVSSSRVKHVLKNSLDLRRYDYYTVGTYDRLKERYVPDNPAGDKHHLRYDYGNFYASKTFYDPSKRRRILWGWANESDTAVDDVAKGWAGIQAIPRKVWLDPSGRQLMQWPVEEVKALRGKKPVSLKDRMVKRGEHVEVTGLQTAQADVEVSFEVPSLEGAEALDPALANDAQKLCGVKGADVEGGVGPFGLWVLASSKLEERTAVFFRVFKAAGNVNSTKPLVLMCSDPTKSSLNKNLYHPTFAGFVDIDMAKGKISLRSLIDQSVVESFGAGGRTCILSRVYPSLAIGRNAHLHVFNNGKADIKVSRLTAWEMKKPALMNGA

SEQ ID NO: 87 - protein, 668 aa, Lolium perenne
MEARDGVSMPYSYAALPEDAEAAVVGRGRRTGPLFAALLLTLVAALLAVAALAGVRLVGELPAGGVVMPNHPMEVMDVSGSRGPESGVSEKTSGAASESGGMLGADAGSNAFPWSNAMLQWQRTGFHFQPEKNWMNDPNGPVYYKGWYHLFYQYNPEGAIWGNKIAWGHAVSRDMLRWRHLPIAMFPDQWYDINGAWSGSATVLPDGRIVMLYTGSTNASVQVQCLAFPSDPSDPLLTNWTKYEGNPVLYPPPHVGEKDFRDPTTAWYDGSDGMWRIVIGSKDNRRAGMALTYKTKNFHDFELVPGVLHRVPATGMWECIDLYPVGGARGIDMTEAVAAASNSGGGEVLHVMKESSDDDRHDYYALGRYDAATNKWTPLDADADVGIGLRYDWGKFYASKTFYDPAKKRRVLWGWVGETDSERADVAKGWASLQSIPRTVVLDTKTGSNLIQWPVVEVETLRTNSTNLGSIIVEHGSVFPLSLHRATQLDIEASFRLDPLDVAAAKEADVGYNCSTSGGAAGRGALGPFGLLVLADARRHGGDTEQTAVYFYVARGLDGNLRTHFCHDESRSSRANDIVKRVVGNIVPVLDGKALSVRVLVAHSIVESFAQGGRSVVTSRVYPTEAIYANAGVYLFNNATGARVPATSLVVHKMDPSYNQNQAEMASL

SEQ ID NO: 88 - protein, 473 aa, Lolium perenne
VHWRHLPLAMVPDQWYDINGVWTGSATVFPDGTLNMLYTGSTNASVQAQCLAVPEDPNDSLLRNWTKHEANPVLLPPPGIGDKDFRDPTTAWFDESDQTWRTVIGSKDNNGHAGIAMVYKTKDFLNYELIPGYLHRVDGTGMWECIDFYPVGGKNGSEELYVIKESSDDDRHDWYTLGKYDAAANTFTAADPENDLGIGLRYDWGKFYASKTFYDPAKKRRVLWGWIGETDSERADVAKGWASLMSIPRTVELDEKTWTNLIQWPVEEIETLRIKSTDLGGITIDHGSVYPLPLHRATQLDIEASFRLDAATVAALNEADVGYNCSTSGGSTHRGALGPFGILVLADGKAEQTAVYFYVSKGLDGALETHFCHDESRSTLAKDVVKRVVGYTVPVLDGEAFSVRVLVDHSIVESFAMGGRSTATSRVYPTESIYGAAGAYLFNNATGGSVTVEKLVVHEMDSSYNQIFMADDL

SEQ ID NO: 89 - protein, 539 aa, Lolium perenne
IFRSRLPDIDIPTHMPLHDYCFATAASAPDAPCLITAATGRTYTFAETHLLCRKAAAALHGLGVRHGDRIMVLLQNSVEFALAFFGASMLGAVSTAANPFCTPQEIHKQLVASGAKLVVTQSAYVDKLRHEAFPRIGEALTVITIDDDGTPDGCQPFWGLVSAADENSVPESPISPDDAVALPYSSGTTGLPKGVVLTHGGLVSSVAQQVDGENPNLHMRAGEDVVLCVLPLFHIFSLNSVLLCALRAGAAVMLMPRFEMGAMLEGIERWRVTVAAVVPPLVLALAKNPGVEKHDLSSIRIVLSGAAPLGKELEDALRGRLPQAIFGQGYGMTEAGPVLSMCPAFAREPTPAKSGSCGTVVRNAELKVVDPDTGVSLGRNLPGEICIRGPQIMKGYLNDPVATAATIDVEGWLHTGDIGYVDDDDEVFIVDRVKELIKFKGFQVPPAELEALLIAHPSIADAAVVPQKDDAAGEVPVAFVVRAADSDIAEEAIKEFVSKQVVFYKRLHKVYFTHAIPKSASGKILRKELRAKLAAPATA

SEQ ID NO: 90 - protein, 559 aa, Lolium perenne
MGSIAADLAPEAPAELVFRSKLPDIEIPTHLTLQDYCFERLPELSARACLIDGATGAALTYGEVDALSRRCAAGLRRLGVRKGDVVMALLRNCPEFAFVFLGAARLGAATTTANPFYTPHEIHRQAAAAGAKVIVTEACAVEKVRAFAAERGIPVVSVDEAVDDGCLPFAATLLGEESGERFVDEAVDPDDVVALPYSSGTTGLPKGVMLTHRSLVTSVAQQVDGENPNLHFSSSDVLLCVLPLFHIYSLNSVLLAGLRAGCAIVIMRKFDHGALVDLVRAHGVTVAPFVPPIVVEIAKSARVTAADLASIRLVMSGAAPMGKELQDAFMAKIPNAVLGQGYGMTEAGPVLAMCLAFAKEPFEVKSGSCGTVVRNAELKIVDPDTGASLGRNLPGEICIRGKQIMKGYLNDPEATKNTIDKDGWLHTGDIGYVDDDDEIFIVDRLKEIIKYKGFQVPPAELEALLITHPEIKDAAVVSMQDELAGEVPVAFVVRTEGSEISENEIKQFVAKEVVFYKRICKVFFADSIPKSPSGKILRKDLRAKLAAGIPGSDTTQSKN

SEQ ID NO: 91 - protein, 559 aa, Festuca arundinacea
MGSIAADAPEAPPAELVFRSKLPDIEIPTHLTLQDYCFQRLPEHSARACLIDGATGAALTYGEVDALSRRCAAGLRRLGVRKGDVVMALLRNCPEFAFVFLGAARLGAATTTANPFYTPHEIHRQATAAGAKVIVTEACAVEKVRAFAAERGITVVSVDEGVDDGCLPFGETLLGEDGGERFVDEAVDPDDVVALPYSSGTTGLPKGVMLTHRSLVTSVAQQVDGENPNLHFSSSDVLLCVLPLFHIYSLNSVLLAGLRAGCAIVIMRKFDHGALVDLVRAHGVTVAPFVPPIVVEIAKSARVTAADLASIRLVMSGAAPMGKELQDAFMAKIPNAVLGQGYGMTEAGPVLAMCLAFAKEPFEVKSGSCGTVVRNAELKIVDPDTGASLGRNLPGEICIRGKQIMKGYLNDPEATKNTIDKDGWLHTGDIGYVDDDDEIFIVDRLKEIIKYKGFQVPPAELEALLITHPEIKDAAVVSMQDELAGEVPVAFVVRTEGSEISENEIKQFVAKEVVFYKRICKVFFADSIPKSPSGKILRKDLRAKLAAGIPGSETTQSKS

SEQ ID NO: 92 - protein, 557 aa, Lolium perenne
MGSVPEESVVSVAAAETVFRSKLPDIEINNEQTLQSYCFEKMAEVASRPCIIDGQTGASYTYTEVDYLTRRAAAGLRRMGVGKGDVVMNLLRNCPEFAFSFLGAARLGAATTTANPFYTPHEIHRQAEAAGAKLIVTEACAVEKVLEFAAGRGLPVVTVDGRRDGCVDFAELIAGEELPEADEAGILPDDVVALPYSSGTTGLPKGVMLTHRSLVTSVAQLVDGSNPNVCFNKDDALLCLLPLFHIYSLHTVLLAGLRVGAAIVIMRKFDVGALVDLVRAHRITIAPFVPPIVVEIAKSDRVGADDLASIRMVLSGAAPMGKDLQDAFMAKIPNAVLGQGYGMTEAGPVLAMCLAFAKEPFKVKSGSCGTVVRNAELKVVDPDTGASLGRNQPGEICVRGKQIMIGYLNDPESTKNTIDKDGWLHTGDIGLVDDDDEIFIVDRLKEIIKYKGFQVAPAELEALLLTNPEVKDAAVVGVKDDLCGEVPVAFIKRIEGSEITENEIKQFVSKEVVFYKRINKVYFTDSIPKNPSGKIVRKDLRARLAAGIPTEVAAPRS

SEQ ID NO: 93 - protein, 557 aa, Festuca arundinacea
MGSVPEESVVAAAVAETVFRSKLPDIEINNEQTLQSYCFEKMAEVASRPCIIDGQTGASYTYTEVESLTRRAAAGLRRMGVGKGDVVMNLLRNCPEFAFSFLGAARLGAATTTANPFYTPHEIHRQAEAAGAKVIVTEACAVEKVLEFAAERGLPVVTVDGKRDGCVDFAELIAGEELPEAEEAGILPDDVVALPYSSGTTGLPKGVMLTHRSLVTSVAQLFDGSNPNVCFNKDDALLCLLPLFHIYSLHTVLLAGLRVGAAIVIMRKFDVGALVDLVRAHRITIAPFVPPIVVEIAKSDRVTADDLTSIRMVLSGAAPMGKDLQDAFMAKIPNAVLGQGYGMTEAGPVLAMCLAFAKEPFKVKSGSCGTVVRNAELKVVDPDTGASLGRNQPGEICVRGKQIMIGYLNDPESTKNTIDKDGWLHTGDIGLVDDDDEIFIVDRLKEIIKYKGFQVAPAELEALLLTNPEVKDAAVVGVKDDLCGEVPVAFIKRIEGSEITENDIKQFVSKEVVFYKRINKVYFTDSIPKNPSGKILRKDLRARLAAGIPTEVAAPRS

SEQ ID NO: 94 - protein, 501 aa, Lolium perenne
MEVLLLEKALLGLFAAAVLAIAVAKLAGKRFRLPPGPSGAPIVGNWLQVGDDLNHRNLMGIAKRFGEVFLLRMGIRNLVVVSSPELAKEVLHTQGVEFGSRTRNVVFDIFTGNGQDMVFTVYGDHWRKMRRIMTVPFFTNKVVAQNRVGWEEEARLVVEDVKADPAFATAGTVIRRRLQLMMYNDMFRIMFDRRFESVDDPLFNKLKAMNAERSILSQSFDYNYGDFIPILRPFLRKYLNRCTNLTTKRMKLFEDHFVADRKKALEQNGEIRCAMDHILEAERKGEINHDNVLYIVENINVAAIETTLWSIEWGIAELVNHPDVQSKLRDEMTAVLGADVAVTEPDLERLPYLQSVVKETLRLRMAIPLLVPHMNLSDAKLAGYDIPAESKILVNAWFLANDPKRWVRADEFRPERFLEEEKAVEAHGNDFRFVPFGVGRRSCPGIVLALPIIGITLGRLVQNFQLLPPPGQDKIDTTEKPGQFSNQILKHATVVCKPLEA

SEQ ID NO: 95 - protein, 505 aa, Festuca arundinacea
MDFVFVEKLLVGLLASVVVAIVVSKIRGRKLRLPPGPIPVPIFGNWLQVGDDLNHRNLAAMARKFGEVFLLRMGIRNLVVVSSPELAKEVLHTQGVEFGSRTRNVVFDIFTGKGQDMVFTVYGDHWRKMRRIMTVPFFTNKVVQQYRAGWEAEAAFVVDNVRADPKAATDGVVLRRHLQLMMYNNMYRIMFDRRFESMDDPLFLRLRALNGERSRLAQSFEYNYGDFIPVLRPFLRGYLGLCEQVKETRLKLFKDYFLDERKKLASTKSMDTNGLKCAIDHILEAQEKGEINEDNVLYIIENINVAAIETTLWSIEWGIAELVNHPEIQQKLRDEMDAVLGAGHQITEPDTHKLPYLQAVIKETLRLRMAIPLLVPHMNLHDAKLAGYNIPAESKILVNAWFLANNPEQWKRPDEFRPERFLEEEKHVEASGNDFRFLPFGVGRRSCPGIILALPILGITIGRLVQNFELTTPPGVDKLDTTEKGGQFSLHILNHSTIVAKPRVF

SEQ ID NO: 96 - protein, 361 aa, Lolium perenne
MGIVNASEKTITGWAARDATGHLSPYTYNLRRTGAEDVVLKVLYCGICHTDLHQTKNHLGAPKYPMVPGHEVVGEVVEVGPEVSKYSVGDVVGVGVIVGCCRDCRPCKANVEQYCNKKIWSYNDVYTDGKPTQGGFASSMVVDQKFVVKIPAGLAPEQAAPLLCAGVTVYSPLKHFGLMTPGLRGGILGLGGVGHMGVKVAKSMGHHVTVISSSDKKRAEAMDDLGADAYLVSSDEAQMAAAMDSLDYIIDTVPVKHPLEPYLALLKMDGKLVLMGVIGEPLSFVSPMVMLGRKTITGSFIGSIEETEEVLRFCVDKGLTSQIEVVKMDYLNQALERLERNDVRYRFVVDVAGSNIDDTAA

SEQ ID NO: 97 - protein, 361 aa, Festuca arundinacea
MGSVDASEKTITGWAARDTTGHLSPYTYTLRRTGAEDVVLKVLYCGICHTDLHQTKNHLGASKYPMVPGHEVVGEVVEVGPEVSKYSVGDVVGVGVIVGCCHDCRPCKANVEQYCNKKIWSYNDVYTDGKPTQGGFASAMVVDQKFAVKIPAGLAPEQAAPLLCAGVTVYSPLKHFGLMTPGLRGGILGLGGVGHMGVKVAKSMGHHVTVISSSNKKRAEAMDDLGADAYLVSSDEAQMAAAMDSLDYIIDTVPVKHPLEPYLALLKMDGKLVLMGVIAEPLSFVSPMVMLGRKTITGSFIGSIEETEEVLRFCVEKGLTSQIEVVKMDYLNHALERLERNDVRYRFVVDVAGSNIKDADA

SEQ ID NO: 98 - protein, 265 aa, Lolium perenne
MATTAADATATVAKEQTTTNGAASGAEQVTRHSEVGHKSLLQSDALYQYILETTVYPREHECMKQLREDTANHPWNLMTTSADEGQFLNLLIKLIGAKKTMEIGVYTGYSLLATALAIPEDGTILAMDINRENYETIGKPCIEKAGVAHKIDFREGPALPVLDELLEDEANHGTFDFVFVDADKDNYLNYHQRLMKLVRVGGLLGYDNTLWNGSVVLPADAPMRKYIRYYRDFVLELNKALAADDRVEICQLPVGDGITLCRRAK

SEQ ID NO: 99 - protein, 265 aa, Festuca arundinacea
MATTAADATATVPKEQPATNGAASGAEQVTRHSEVGHKSLLQSDALYQYILETTVYPREHECMKQLREDTANHPWNLMTTSADEGQFLNLLIKLIGAKKTMEIGVYTGYSLLATALAIPEDGTILAMDINRENYETIGKPCIEKAGVAHKIDFREGPALPVLDELLEDEANHGSFDFVFVDADKDNYLNYHQRLMKLVRVGGLIGYDNTLWNGSVVLPADAPMRKYIRYYRDFVLELNKALAADDRVEICQLPVGDGITLCRRAK

SEQ ID NO: 100 - protein, 363 aa, Lolium perenne
MTVVEVLAAGDAAAAAVARPAGNGQTVCVTGAAGYIASWLVKLLLEKGYTVKGTVRNPDDPKNAHLRALDGAADRLVLCKADLLDYDAIRRAIDGCHGVFHTASPVTDDPEQMVEPAVRGTQYVIDAAAEAGTVRRMVLTSSIGAVTMHPNRGPDVVVDESCWSDLDFCKKTRNWYCYGKAVAEQAASELARQRGVDLVVVNPVLVIGPLLQPTVNASIGHILKYLDGSASKFANAVQAYVDVRDVADAHLRVFECAAASGRHLCAERVLHREDVVRILAKLFPEYPVPTRCSDEANPRKQPYKMSNQKLQDLGLEFRPVSQSLYETVKSLQEKGHLPVLSEQAEADKETLAAELQAGVTIRA

SEQ ID NO: 101 - protein, 342 aa, Festuca arundinacea
MTVVDAAAPQLPGHGQTVCVTGAAGYIASGLVKLLLERGYTVKGTVRNPDDPKNAHLKALDGATERLILCKADLLDYDAICAAVEGCHGVFHTASPVTDDPEQMVEPAVRGTEYVINAAADAGTVRRVVFTSSIGAITMDPNRGPDVVVNESCWSDLEFCKKTKNWYCYGKAVAEQAAWEAARKRGIDLVVVNPVLVVGPLLQPTVNASAAHILKYLDGSAKKYANAVQSYVDVRDVAGAHIRVFEAPEASGRYLCAERVLHRGDVVQILSKLFPEYPVPTRCSDEVNPRKQPYKMSNQKLQDLGLQFTPVNDSLYETVKSLQEKGHLLVPSKPEGLNGVTA

SEQ ID NO: 102 - protein, 360 aa, Festuca arundinacea
MGSTAADMAASADQEACMFALQLASSSILPMTLKNAIELGLLEILVAAGGKSLTPTEVAAKLPSAANPEAPDMVDRMLRLLASYNVVTCLVEEGKDGRLSRSYGAAPVCKFLTPNEDGVSMAALALMNQDKVLMESWYYLKDAVLDGGIPFNKAYGMSAFEYHGTDPRFNRVFNEGMKNHSIIITKKLLELYHGFQGLGTLVDVGGGVGATVAAIAAHYPAIKGVNFDLPHVISEAPQFPGVTHVGGDMFKEVPSGDAILMKWILHDWSDQHCATLLKNCYDALPAHGKVVLVECILPVNPEAKPSSQGVFHVDMIMLAHNPGGRERYEREFEALARGAGFTGVKSTYIYANAWAIEFTK

SEQ ID NO: 103 - protein, 360 aa, FLolium perenne
MGSTAADMAASADEDACMFALQLASSSVLPMTLKNAIELGLLEILVAAGGKSLTPTEVAAKLPSAANPEAPDMVDRILRLLASYNVVTCLVEEGKDGRLSRSYGAAPVCKFLTPNEDGVSMAALALMNQDKVLMESWYYLKDAVLDGGIPFNKAYGMSAFEYHGTDPRFNRVFNEGMKNHSIIITKKLLELYHGFEGLGSLVDVGGGVGATVAAIAAHYPTIKGVNFDLPHVISEAPQFPGVTHVGGDMFKEVPSGDAILMKWILHDWSDQHCATLLKNCYDALPAHGKVVLVECILPVNPEANPSSQGVFHVDMIMLAHNPGGRERYEREFQALARGAGFTGVKSTYIYANAWAIEFTK

SEQ ID NO: 104 - protein, 360 aa, Festuca arundinacea
MGSTAADMTASADEEACMFALQLASSSILPMTLKNAIELGLLEILVAAGGKSLTPTEVAAKLPSAANPEAPDMVDRMLRLLASYNVVSCLVEEGKDGRLSRNYGAAPVCKFLTPNEDGVSMAALALMNQDKVLMESWYYLKDAVLDGGIPFNKAYGMSAFEYHGTDPRFNRVFNEGMKNHSIIITKKLLELYDGFQGLGTLVDVGGGVGATVAAITAHYPAIKGVNFDLPHVISEAPPFPGVTHVGGDMFKKVPSGDAIMMKWILHDWSDQHCATLLKNCYDALPAHGKVVLVECILPVNPEAKPSSQGVFHVDMIMLAHNPGGRERYEREFEALARGAGFAGVKSTYIYANAWAIEFTK

SEQ ID NO: 105 - protein, 361 aa, Lolium perenne
MGSTAAEIAASADEEACLYALQLGSSSILPMTLKNTIELGLLETLMAAGGKSLTPTEVAAKLPCAAKNPEAPDMVDRMLRLLASYNLVSCLVEEGTDGRLSRRYGAAPVCKFLTPNEDGVSMAALALMNQDKVLMESWYYLKDAVLDGGIPFNKAYGMSAFEYHGTDLRFNRVFNEAMKNNSIIITKKLLQLYDGFQGLGTLVDVGGGVGATVAAITAHYPTIKGINFDLPHVISEAPPFPGVTHIGGDMFKKVPSGDAILMKWILHDWSDQHCATLLKNCYDALPVHGKVVLVECILPVNPEAKPSSQGVFHVDMIMLAHNPGGRERYEREYEALARGAGFAGFKSTYIYANAWAIEFTK

SEQ ID NO: 106 - protein, 532 aa, Lolium perenne
MVGFAKIAMEWIQDPLSWLFIASVVFVVLQRRRRGNVAPFPPGPKPLPIVGNMSMMDQLTHRGLAALAKEYGGLLHIRLGKLHTFAVSTPEYAREVLQVQDGAFSNRPATIAIAYLTYDRADMAFAHYGPFWRQMRKLCVMKLFSRRRPETWLAVRDESAALVRAVARRTGESVDLGELIFKLTKNVIFRAAFGAGAVAADAEEGDGAGKQDEFIAILQEFSKLFGAFNIGDFIPWLSWADPQGINVRLRAARNALDEFIDKIIDEHMERGKNPDDADADMVDDMLAFLPEAKPKKGAAGDGVDDLQNTLRLTRDNIKAIIMDVMFGGTETVASAIEWAMAEMMHSPDDLRRLQQELVDVVGLDRNVDESDLDKLPFLKCVIKETLRLHPPIPLLLHETAEDCVVGGYSVPRGSRVMINVYAIGRDRRAWKDADVFRPSRFVQGEGEAAGLDFKGGCFEFLPFGSGRRSCPGMALGLYALELAVAQLAHGFSWELPDGMKPSELDMSDVFGLTAPRATRLFAVPTPRLACTQ

SEQ ID NO: 107 - protein, 542 aa, Festuca arundinacea
MVGFAKIAMEWLQEPLSWLFIASVVFVVLQRRRRGNVAPFPPGPKPLPIVGNMSMMDQLTHRGLAALAKEYGGLLHIRLGKLHAFAVSTPEYAREVLQVQDGAFSNRPATIAIAYLTYDRADMAFAHYGPFWRQMRKLCVMKLFSRRRPETWLAVRDESAALVRAVARRSGESVDLGELIFKLTKNVIFRAAFGAGAVAGDGDGDGAGKQDEFIAILQEFSKLFGAFNIGDFIPWLSWADPQGINVRLRAARAALDEFIDKIIDEHMERGKNPDDADADMVDDMLAFLPETKPKKGAAGDGVDDLQNTLRLTRDNIKAIIMDVMFGGTETVASAIEWAMAEMMHSPGDLRRLQQELADVVGLDRNVDESDLDKLPFLKCVIKETLRLHPPIPLLLHETAEDCIVGGYSVPRGSRVMINVYAIGRDRKAWKDADVFRPSRFVQGEGEAAGLDFKGGCFEFLPFGSGRRSCPGMALGLYALELAVAQLAHGFSWELPDGMKPSELDMSDVFGLTAPRATRLFAVPTPRLACTQLLGADDAGRQA

SEQ ID NO: 108 - protein, 711 aa, Lolium perenne
MESENVAANGDGLCVAQPARADPLNWGKAAEELSGSHLDAVKRMVEEYRRPVVTMEGASLTIAMVAAVAAGADTRVELDESARGRVKESSDWVMNSMANGTDSYGVTTGFGATSHRRTKEGGALQRELIRFLNAGAFGTGSDGHVLPAATTRAAMLVRVNTLLQGYSGIRFEILETVATLLNANVTPCLPLRGTITASGDLVPLSYIAGLVTGRPNSVATAPDGTKVNAAEAFKIAGIQHGFFELQPKEGLAMVNGTAVGSGLASMVLFEANILGILAEVLSAVFCEVMNGKPEYTDHLTHKLKHHPGQIEAAAIMEHILEGSSYMMLAKKLGELDPLMKPKQDRYALRTSPQWLGPQIEVIRAATKSIEREINSVNDNPLIDVSRGKAIHGGNFQGTPIGVSMDNTRLAIAAIGKLMFAQFSELVNDFYNNGLPSNLSGGRNPSLDYGFKGAEIAMASYCSELQFLGNPVTNHVQSAEQHNQDVNSLGLISARKTSEAIDILKLMSSTFLVALCQAIDLRHLEENVKNAVKNCVKMVARKTLSTNDSGHLHSARFCEKDLLLTIDREAVFAYADDPCSANYPLMQKMRAVLVEHALANGEAERDVQTSVFAKLAAFEQELRAVLPREVESARCAVENGTAAQQNRITECRSYPLYRFVRKELGTEYLTGEKTRSPGEEVDKVFVAMNQGKHIDALLECLKEWNGEPLPIC

SEQ ID NO: 109 - protein, 713 aa, Festuca arundinacea
MECENGHVAANGDGLCVAQPARADPLNWGKAAEELSGSHLDAVKRMVEEYRRPVVTMEGASLTIAMVAAVAAGADTRVELDESARGRVKESSDWVMNSMANGTDSYGVTTGFGATSHRRTKEGGALQRELIRFLNAGAFGTGSDGHVLPAATTRAAMLVRVNTLLQGYSGIRFEILETIATLLNANVTPCLPYRGTITASGDLVPLSYIAGLVTGRPNSVATAPDGSKVNAAEAFKIAGIQHGFFELQPKEGLAMVNGTAVGSGLASIVLFEANILGILAEVLSAVFCEVMNGKPEYTDHLTHKLKHHPGQIEAAAIMEHILEGSSYMMLAKKLGELDPLMKPKQDRYALRTSPQWLGPQIEVIRAATKSIEREINSVNDNPLIDVSRGKAIHGGNFQGTPIGVSMDNTRLAIAAIGKLMFAQFSELVNDFYNNGLPSNLSGGRNPSLDYGFKGAEIAMASYCSELQFLGNPVTNHVQSAEQHNQDVNSLGLISSRKTAEAIDILKLMSSTFMVALCQAIDLRHIEENVKNAVKNCVKTVARKTLSTNDSGHLHNARFCEKDLLLTIDREAVFAYADDPCSANYPLMQKMRAVLVEHALANGEAEQDVQTSVFAKLATFEQELRAVLPKEVESARCSVENGTAAQQNRISECRSYPLYRFVRKELGTEYLTGEKTRSPGEEVDKVFVAMNQGKHIDALLECLKEWNGEPLPIC

SEQ ID NO: 110 - protein, 323 aa, Festuca arundinacea
MAFSGSVSGVVLVVAILLLGLAAAASAQLSATFYDASCPSALATIKSAVTAAVNNEARMGASLLRLHFHDCFVQGCDASVLLNDTANFTGEQTAFPNRNSIRGLNVIDNVKAQVEAVCTQTVSCADILAVAARDSIVALGGPSYTVPLGRRDSTTASLSEANRDLPPPSSDLADLVGNFSRKGLSVTDMVALSGAHTIGRAACLNFRSRIYGESNIAPAYAASLQANCPQSAPNGDGTLAPLDVSTPDAFDNAYYGNLLSQQGLLHSDQQLFNGGSTDSLVSTYASNAAQFSGDFAAAMVNMGNIGVLTGAQGEIRLNCGKVN

SEQ ID NO: 111 - protein, 344 aa, Lolium perenne
MASSSSPFSRVSQLAVKATVLAAVCLLLHGGGGSSASAAELCVSYYDHTCPDAYKIVQGVLVEAHKSDPRIFASLIRLHFHDCFVLGCDGSLLLDTFPGFQSEKDARPNNNSARGYPVVDAAKAALEKACPGVVSCADILALAAEISVQLSGGPGWGVLLGRLDGKTSSIAGAQNLPGPFDGLKNLTLKFQAVNLDVTDLVALSGAHTFGRVKCRFVTNRLYNFSGTNQPDPTLNAAYRAFLSTRCPRNGDANSLNDLDPTTPDTFDKNYFTNLEKNRGFLDSDQQLKSDPGALTTTAPIVDRFASSQDAFFKSFAWSMIKMGNILPITDPSRGEVRKHCAFVN

SEQ ID NO: 112 - protein, 326 aa, Festuca arundinacea
MATRGVMVALLLAAVAASCAHAQLHEKFYSESCPSVEDVVRKEMVMALSLAPSLAAPLLRMHFHDCFVRGCDGSVLLDSANKTAEKDALPNQTLRGFDFVERVKAAVEKACPDTVSCADVVTLIARDAVWLSKGPFWEVPLGRRDGSVSISNETDALPPPTANITVLTQLFAAKNLDIKDLVVLSAAHTIGTSHCFSFSDRLYNFTGLDNASDIDPTLEPFYMAKLKSKCTSLDDNSTLVEMDPGSFKTFDLDYFKLVSKRRGLFHSDGALLTDAFTRAYILRHATGAFKDEFFADFAVSMVKMGNTDVLTGSQGEIRKKCSVVNH

SEQ ID NO: 113 - protein, 358 aa, Lolium perenne
MASSRVLLLVVAALAISVSATAAATKISAPLPPLAKGLNFDFYKATCPQAESIVFNFLRDAIRKDVGLAAALLRIHFHDCFVQGCDGSVLLDKTGGTDSEKIAPPNVTLRPTAFKAINDLRALLAKACGAVVSCADIAALAARDSVHLAGGPHYPVPLGRRDGLAPANLTTILNALPAPSSNVTTLLRFLAKISLDANDLVALSGAHTLGIAHCTSFQERLFPQNDVTLNKWFASQLRLTCPALNTDNTTNNDIRTPNVFDNKYYVDLLNRQGLFTSDQDLHTDARTKPTVTRFAVDQAAFFDQFVFSVVKMGQINVLTGSQGQIRNDCSAPNKGRTNDDLPWSVLETVTEAAQSLVL

SEQ ID NO: 114 - protein, 344 aa, Lolium perenne
MTTMGGSSILPAPTVATTALVLLIVLFASPATVAKGSGLSVGFYKKLCPKAEKVVRRTVTKAFEKEPGTPADIIRLFFHDCFVRGCDASVLLESTPGRMAERDSKANNPSLDGFEVISDAKETLEKLCPQTVSCADILALAARDGAYLASGLDYAVPTGRRDGLVSKEDEVLPSVPHPDFNHSQLVENFTAKGFTAEEMVTLSGAHTIGTSHCSSFTDRLYNFSQGGALTTDPALPAAYAALLKEKCPPETAAQNDTTMVQLDDVTPFVMDNQYYKNLLAGTVPLGSDVALMESPDTAALVELYAREPAEYWAKRFVAAMVKVSEMEVLTGAEGEIRLNCSKVN

SEQ ID NO: 115 - protein, 293 aa, Lolium perenne
TRENYYGSSCPTALLTIRTVVTTAVLLDHRMGASLLRLHFHDCFVQGCDASVLLDDTAGFTGEKGAGPNAGSLRGLEVIDKIKMLLEFMCPRTVSCADILAVAARDSVVRLGGPSWAVQLGRRDATTASASLASSDLPGPNSNLNDLLTAFSKKGLSTTDMVALSGAHTIGRAQCQNYRNRIYTDTDIDGAFAASLRGGCPQAGGDGNLAPLDASSPNTFDNGYFSGLLSRQGLLHSDQALYDGGSTDDLVRTYASNNDQFGSDFAAAMVKLSNIGLLTGSSGEIRVNCRAVN

SEQ ID NO: 116 - protein, 311 aa, Festuca arundinacea
MASASCISLVLLVALAATAASAQLSSTFYDTSCPRALATIKSGVAAAVSSNPRMGASLLRLHFHDCFVNGCDASVLLSGNEQNAPANAGSLFGFGVIDNIKTQLEGICKQTVSCADILTVAARDSVVALGGPSWTVPLGRRDSTSATGNTGDLPGPGSSLAQLQAAFAKKNLNTVDMVALSGAHTIGRAQCQNFRSRIYGGDSNINAAFATSLKANCPQSGGNGNLAALDATTANAFDNAYYTNLLSQKGLLHSDQVLFNNGSTDNTVRNFASSGAAFSSAFATAMIKMGNISPLTGTQGQIRLSCSKVNS

SEQ ID NO: 117 - protein, 230 aa, Lolium perenne
MAVSELEVDGVVFPPLARPPGTAHAHFLAGAGVRGMELGGNFIKFTAIGVYLQADAAVSALATKWAGKPADELAADNAFFRDVVTGEFEKFTPVTMILPLTGAQYSEKVTENCVAYWKAVGKYTNAEAAAVDKFKEAFRTESFPPGASILFTHSPAGVLTVAFSKDSSVPESGGVAIENRPLCEAVLESIIGEHGVSPAAKLSLATRVAELLNEAAPVGQAAAEPVSVSA

SEQ ID NO: 118 - protein, 231 aa, Festuca arundinacea
MAVSELEVDGVVFPPLARPPGTAHAHFLAGAGVRGMELGGNFIKFTAIGVYLQADAAVSALAAKWAGKPADELAADNAFFRDVVTGEFEKFRRVTMILPLTGAQYSEKVTENCVAYWKAVGKYTDAEAAAVDKFKEAFKAESFPPGASILFTHSPAGVLTVAFSKDSSLPESGGVAIENRPLCEAVLKSIIGKHGVSPAAKLSLATRVAELLKEAAPVGEPAVAEPVSVSA

SEQ ID NO: 119 - protein, 394 aa, Lolium perenne
MAATMTVEEVRKAQRAEGPATVLAIGTATPANCVYQADYPDYYFKITKSDHLADLKEKFKRMCDKSQIRKRYMHLTEEILEENPNMCAYMAPSLDARQDIVVVEVPKLGKAAAQKAIKEWGQPRSKITHLVFCTTSGVDMPGADYQLTKMLGLRPSVKRLMMYQQGCFAGGTVLRLAKDLAENNRGARVLVVCSEITAVTFRGPHESHLDSLVGQALFGDGAAAVIIGADPDVSVERPLFQLVSASQTILPDSEGAIDGHLREVGLTFHLLKDVPGLISKNIERALEEAFKPLGIDDWNSVFWVAHPGGPAILDMVEAKVNLNKERMRATRHVLSEYGNMSSACVLFIMDEMRKRSAEDGHTTTGEGMDWGVLFGFGPGLTVETVVLHSMPIAA

SEQ ID NO: 120 - protein, 196 aa, Festuca arundinacea
MYFVSKSLAENAAMDYAKENGVDFISIIPTLVVGPFLSAGMPPSLVTALALITGNEAHYSILKQVQLVHLDDLCDSMTYLFEHPDANGRYICSSHDTTIHGIARMLKERFPEYDIPQKFPGADDDLQPIHFFFKKLLDHGFRFRYTAEDMFDAAVWTCREKGLIPLGAEGAGGPASAAGKLGAVLVGEGQAIGAET

SEQ ID NO: 121 - protein, 329 aa, Lolium perenne
MATEAKGETVLVTGASGFIGSWLVRLLLARGYSVHAAVLNPDDKAETDHLLALAAAAGDEGRIRFFRCDLLDGAAMLAAVRGCSGVFHLASPCTVNLVLNPQKELVVPAVEGTLNVLRAAKEAGGVRRVVVTSSVSALVPCPGWPAGEVLDERCWTDIDYCDKNGVWYPASKALAEKAAWKFAEENGLDVVTVNPGTVLGEMIPPRLNASMAMFLRLLEGCKEEYADFFIGPVHVEDVALAHILLYENPSASGRHLCVEPICHWSVFAAKVAELYPDYKVPKFPEDTQPGLVRAKAVPKKLMALGLQFTPLEKIIRDAVESLKSRGCIA

SEQ ID NO: 122 - protein, 328 aa, Lolium perenne
GSTKGKVCVTGASGFVASWLIKKLLESGYHVIGTVRDPGNRRKVGHLWKLPGANERLQLVRADLLEEGSFDDAVRACEGVFHIASPVLGKSDSNCKEATLGPAINGTLNVLRSCKKSPFLKRVVLTSSSSAVRIRDETQQPELLWDETTWSSVPLCEKLQLWYALAKVFAEKAALDFAKENNIDLVTVLPSFVIGPSLSHELCTTASDILGLLQGDTDRFTLYGRMGYVHIDDVARSHILVYETPEATGRYLCSSVVLDNNELVGLLAKQFPVFPIPRRLKNPYGKQAYQLDTSKLQGLGLKFKGVQEMFNDCVESLKDQGHLLECPL

SEQ ID NO: 123 - protein, 369 aa, Lolium perenne
MAPVVERAPFLPTGEATLRPSFVRDEDERPKVAHDRFSDEVPVISLHGIDDARRTEIRDRVAAACEGWGIFQVVDHGVDAALIAEMARLSRDFFALPAEDKLRYDMSGGKKGGFIVSSHLQGETVQDWREIVTYFSYPVKARDYGRWPDKPAGWRAVVEQYSERLMALSCKLLGVLSEAMGLETEALSKACVDMDQKVVVNFYPKCPQPDLTLGLKRHTDPGTITLLLQDLVGGLQATRDGGNTWITVQPIAGAFVVNLGDHGHYLSNGRFKNADHQAVVNGESSRLSIATFQNPAPDAKVWPLAVREGEDTILEEPITFTEMYRRKMARDLELAKRKKQAKADQLKQQLQQEAAPAAAPTKPLNQILA

SEQ ID NO: 124 - protein, 380 aa, Festuca arundinacea
MASVENAPFLPTAATGEATLRPSFVRDEDERPKVAHDRFSDEVPVISLHGIDDGGARRAEIRDRVAAACEGWGVFQVVDHGVDAALVAEMARLSREFFALPAEDKLRYDMSGGKKGGFIVSSHLQGETVQDWREIVTYFSYPVKARDYGRWPEKPAGWRAVVEQYSERLMALSCKLLGVLSEAMGLETEALSKACVDMDQKVVVNFYPKCPQPDLTLGLKRHTDPGTITLLLQDLVGGLQATRDGGNTWITVQPVPGAFVVNLGDHGHYLSNGRFKNADHQAVVNGESSRLSIATFQNPAPEAKVWPLAVREGEDTILEEPITFTEMYRRKMACDLELAKRKKQAKADQLKQQLQQEQQEAVAAAAPKPATTKPLNQILA

SEQ ID NO: 125 - DNA, 2105 bp, Lolium perenne
acttagccttcctcggaaccatcgaccgggccgccgccgacgcgacgcgacgcgatggagtccagcgccgtcgtccccggcaccacggcgccgctgcttccttatgcgtacgcgccgctgccgtcgtcctccgacgacgcccgtgaaaacagaagtagcggcggcgtgaggtggcgcgcgtgcgccgccgttctggcggcctcggcgttggcggtggtggtcgtggtcgggctcctcgcgggcggcagggtggatcgggtcccggccggcgcagacgtggcgtcggccacggtgccggccgtgccgatggagttcccgaggagccggggcaaggacttgggcgtgtcggagaagtcctccggtgcctactccgccgacggcgggttcccgtggagcaacgccatgctgcagtggcagcgcaccgggttccatttccagccggagcagcactacatgaacgatcccaacggccccgtgtactacggcggatggtaccacctcttctaccagcacaaccccaagggcgacagctggggcaacatcgcctgggcccacgccgtgtccaaggacatggtcaactggcgccacctcccgctcgccatggttcccgaccagtggtacgacagcaacggcgtcctcaccggctccatcaccgtgctccccgacggccaggtcatcctgctctacaccggcaacaccgacaccctagcccaggtccagtgcctcgccacgcccgccgacccgtccgacccgctcctccgcgaatggatcaagcaccccgccaaccccatcctcttcccgccgcccgggatcgggctcaaggacttccgcgacccgctcaccgcctggttcgaccactccgaccacacctggcgcaccgtcatcgggtccaaggacgacgacggccacgccggcatcatcctcagctacaagaccaaggacttcgtcaactacgagctcatgcccgggaacatgcaccgcgggcccgacggcaccggcatgtacgagtgcatcgacctctaccccgtcggcggcaactcgtcggagatgctcggcggcgacgactcgcccgacgtgctcttcgtgctcaaggagagcagcgatgacgaacgtcacgactactatgcgctcggaaggttcgacgccgtcgccaacgtttggacgcccatcgaccgggacctggaccttgggatcgggctcagatacgactggggaaagtactacgcctccaagtccttctacgaccagaagaagaaccgccgcatcgtatgggcatacatcggcgagaccgactccgagcaggccgacatcaccaagggatgggccaatctcatgacgattccaagaacggtggagcttgacaggaagacccgcacaaacctcatccaatggccagtggaggaggtcgacaccctccgcaggaactccacggacctcggtcgcatcaccgtcaacgccggctccgtcattcgcctccccctccaccagggcgctcaactcgacatcgaggcctccttccaactcaactcttccgacgtggatgctatcaacgaggccgacgtcggctacaactgcagcaccagcggtgccgccgtacggggggcgctcggcccctttggcctcctcgtccttgccaatggccgcaccgaacagacggctgtgtacttctacgtgtccaagggcgtcgacggcggcctccagacccacttttgccacgacgagtcacggtcaacacgggcaaaggatgtcgtgaataggatgattggcagcatcgtgccggtgcttgacggtgagaccttttcggtgagggtgctagtggaccactccatcgtgcagagcttcgcgatgggcgggaggatcacggcgacgtcgcgggcgtacccgacggaggccatctacgcggccgcaggggtctacctcttcaacaacgccacgggcgccaccgtcaccgccgagaggctcgtcgtgcacgagatggcctcagctgacaaccatatcttcacgaacgacgacttgtagatgaaaccaagtttagctcgtgttgcattcttgttaacggccggtgattgcctatctacacattcatttggcgttcaaaaaaaaaa

SEQ ID NO: 126 - DNA, 2068 bp, Festuca arundinacea
cccatccaccggagtatactaggaaattcctgcaactcgacctcgcgttgggaattccggcaatggagtcccgggcctttcccaacgcggcgtacgcgccacttctgccacccaccgctgacgacgccaccctgggcaagcaggaccgccccggcgtggggtggcgcgggttcttaaccgtgctggccgcgtctggcgtggtggtgctcctcgtcgctgccactatgctcgcgggatccaggatgggtcaggcaggcgacaccgacgaggacggggccggagggttcccgtggagcaacgagatgctgcagtggcagcgcgccgggttccattaccagcccgaggggcacttcatgagcgatccagacggtccggtatactaccgtggatattaccacctcttctttcagtacaaccgaaggggcgtcgcgtgggatgactacatagagtggggccacgtggtgtcccaggacctggtacactggcgccctctcccactggccctgcggcctgaccattggtacgacaagaagggcgtcttgtcgggtaccatcacggtgctccacaatggcacgctcgtcctgctctacacgggggtcacagaagaccctatggccgagtctcagtgcatcgccgtcccgaccgaccccaacgaccccctccttcgccattggaccaagcaccccgccaaccctgttctcgctcacccacagggggtccagggcatggacttccgagaccccaccagtgcatggtttgacaagtccgacgccacgtggcgcattctcatcggttccaaggatgacgacaatggaagccacgctggcatcgccttcatcttcaagaccaaggacttccttagcttcgagcgcgtcccaggtatcgtgcatcgtgtcgagggtaccggtatgtgggagtgcatcgacttttaccccgtcggaggtggccacaactcttcgtcggaggagctgtacgtgataaaggcgagcatggacgacgaacgacacgactactactcattggggagatatgacgcggcagccaacacatggacgccattggacgccgagctagacttggggattgggctgagatacgactggggcaagctctacgctgccacgtcgttctacgatccgctgaagcagcggcgaattatgttggggtatgtaggcgagaccgactctgcacgagccgacgttgccaagggatgggcctcacttcagtcgattccgaggacagtgacactagacgagaagaccaggacgaacctcctcctatggccggtggaggaggtggaggccctccgctacaactccaccgacctcagtggcatcactgttgacaacggctcagtcttccacctccccctccaccaagccactcagctggacatcgaggcttccttccgcctcgacgcttctgacgttgccgccatcaacgaggccgatgtcggctataactgcagcagcagcggtggcgcggccgcacgtggcgctatcggccccttcggcctcctcgtccatgccgccggagacctccgtggcgagcagacggcggtgtacttctacgtgtccagggccctcgacggtaccctccggactagcttctgcaacgacgagacgcggtcgtcacgggccagggacgtgacgaagcgggtggtgggcagcacggtgccggtgctccacggtgaggcgttgtcgatgagggtgctcgtggaccactccatcgtgcagagcttcgccatgggtgggagagtcacggcgacctcgcgggtgtacccaacggaggccatctacgccagggcaggggtgtacctgttcaacaacgctaccggcgccagcgtgactgcggagaggctcatcgtgcacgagatggcctcggcggtatacgacgagaccctgatcatggttgaggactcgtagctgctcacatgagctatatatcagaccggtaacgttgggtcacttgcatttccaagcgttgaataatttacttagcttagcaagcaacaggtccgaggttccaagtaaggtgtgggatattcttccaaaattcaaaaaaaaaa

SEQ ID NO: 127 - DNA, 2198 bp, Lolium perenne
cacccatccaccggaatatatatactagccaggaaattcctgcaactcgacctcgagttgggaattccggcaatggagtcccgggcctttcccagcgcggcgtacgcgccacttctgccatccgccgcagacgacgtcgccctggccaagcaggaccgccccggcgtggggtggcgcgggttcttaaccgtgctggccgcctgcggcgtggtggtgctcctcgtcggtgccactttgctcgcgggatccaggatgggtcaggcaggcgacggcgaaggcaacaccgacgaggatggggccggagggttcccgtggagcaacgagatgctgcagtggcagcgcgccgggttccattaccagccggaggggcacttcatgagcgatccaaacggtccagtatactaccgcggatattaccacctcttctttcagtacaaccgaaggggcgtcgcgtgggatgactacatagagtggggccacgtggtgtcccaggacctggtacactggcgccctctcccactggccatgcggcctgaccattggtacgacaagaagggcgtcttgtcgggtaccatcacggtgctccacaatggcacgctcgtcctgctctacacgggggtcacagaagaccctatggccgagtcccagtgcatcgccgtcccgaccgaccccaacgaccccctccttcgccattggaccaagcaccccgccaaccccgtcctcgctcacccacagggggtccagggcatggacttccgagaccccaccagcgcgtggtgggacaagtccgatgccacgtggcgcattctcatcggttccaaggacgacgacaacggcagccacgctggcatcgccttcatcttcaagactaaggacttccttagcttcgagcgtgtcccaggtatcgtgcatcgtgtcgagggcaccggcatgtgggagtgcatcgacttttaccccgtcggaggtggccacaactcttcgtcggaggagttgtacgtgataaaggcgagcatggacgacgaacgccacgactactactcattggggaggtacgacgcggcagcgaacacatggacgccattggacgccgagctagacttggggattgggctgagatacgactggggcaagctctacgcttccacgtcgttctacgatccggtgaagcagcggcgcattatgttggggtatgtaggcgaggtcgactctgcgcgagccgatgttgccaagggatgggcctcgcttcagtcgattccgaggacagtggcgctagacgagaagacccgaacgaacctcctcctatggccggtggaggaggtggaggccctccgctacaactccaccgacctcagcggcatcaccattgacaacggctccgtcttccacctcccactccaccagaccactcagctggacatcgaggcttccttccgcctcgacgcttctgatgttgccgccatcaacgaggccgacgtcggctacaactgcagcagcagcggcggcgcggcggcacgtggcgctctcggccccttcggcctcctcgtccatgccgccggagacctccgtggcgagcagacggcggtctacttctacgtgtccagggccctcgacggtaccctccggaccagcttctgcaacgacgagacgcggtcgtcgcgggccagggacgtgacgaagcgggtggtgggcagcacggtgccggtgctcgacggcgaggcgttgtcgatgagagtgctcgtggaccactccatcgtgcagagcttcgcgatgggcgggaggaccacggcgacctcgcgcgtgtacccgacggaggccatctacgccagggctggggtgtacctgttcaacaacgccaccggcgccggcgtgacggcggagaggctcatcgtgcacgagatggcctcggcggtatacgacgagaccctcatggttgaggactcatagctgctcacccgtaacgttgggtcacttgcatttccaagcgttgaattaataatttacttgttgtagcagcaagcaacggtccgaggttccaagtaaggtgggatattctaccaaactccgcgagtcccgcaaggttgtgtaggtgtgagttgatgttggcgcacctgcgcgtgtgcatgtaagttgttgtatttgttgttcttttaaaaaagaaagataccaatctaccatactatgtaagcataaaaaaaaaa

SEQ ID NO: 128 - DNA, 2208 bp, Lolium perenne
cacccatccaccggagtatactagctaggaaattcctgtgcaactcgacctcgagtttggaattccggcaatggagtcccgggactttcccagcgcggcgtacgcgccacttctgccatctgccgcagacgacgtcgccctggccaagcaggaccgccccggcgtggggtggcgcggcttcttaaccgtgctggccgcctgcggcgtggtggtgctcctcgtcgctgcctctttgctcgcggggtccaggatgggtcaggcaggcgacaccgacgaggacggggccggagggttcccgtggagcaacgagatgctgcagtggcagcgcgccgggttccattaccagccggaggggcacttcatgagcgatccagacggtccggtatactaccgtggatattaccacctcttctttcagtacaaccgaagaggggtcgcgtgggatgactacatagagtggggccacgtggtgtcccaggacctggtacactggcgccctctcccactggccatgcggcctgaccattggtacgacaagaagggcgtcttgtcgggtaccatcacggtgctccacaatggcacgctcgtcctcctctacacgggggtcacagaagaccctatggccgagtcccagtgcatcgccgtcccgaccgaccccaacgaccccctccttcgccattggaccaagcaccccgccaaccccgttctcgctcacccacagggggtccagggcatggacttccgagaccccaccagcgcgtggtgggacaagtccgactccacgtggcgcattctcatcggttccaaggacgacgacaacggcagccacgctggcatcgccttcatcttcaagaccaaggacttccttagcttcgagcgtgtcccaggtatcgtgcatcgtgtcgagggtaccggcatgtgggagtgcatcgacttttaccccgttggaggtggccacaactcttcgtcggaggagttgtacgtgataaaggcgagcatggacgacgaacgacacgactactactcattggggaggtatgacgcggcagcgaacacatggacgccattggacgccgagctagacttggggattgggctgaggtacgactggggcaagctctacgcttccacgtcgttctacgatccactgaagcagcggcgaattatgttggggtatgtaggcgaggtcgactctgcgcgagccgacgttgccaagggatgggcctcacttcagtcgattccgaggacagtggcactagacgagaagacccggacgaacctcctcctatggccggtggaggaggtggaggccctccgctacaactccaccgacctcagcggcatcactgttgagaacggctccatcttccacctccctctccaccaagccactcagctggacatcgaggcttccttccgcctcgatgcttctgatgttgctgccatcaacgaggccgacgtcggctacaactgcagcagcagcggtggcgcggccgctcgtggcgctctcgggcccttcggcctcctcgtccatgccgccggagacctccgtggcgagcagacggcggtgtacttctacgtgtccagggccctcgacggtagcctccggaccagcttctgcaacgacgagacgcggtcgtcacgggcccgggacgtgacgaagcgggtggtgggcagcacggtgccggtgctcgacggcgaggtgttagcgatgagggtgctcgtggaccactcgatcgtgcagagcttcgcgatgggtgggagggtcacggcgacgtcgcgggtgtacccaacggaggctatctacgccagggcaggggtgtacctgttcaacaacgccaccggcgccagcgtgacggcggagaggctcatcgtgcacgagatggcctcggcggtatacgacgagaccgtcatggttaaggactcatagctgctcacacatgagctatcagaccggtaacgttgggtcactagcattttcaagcgttgaaataatttacttggcgtagcaagccccgggtccgaggttccaaaagtaaggtgggatattcttccaaactccgcgagtcccgcaaggttgtctaggtgtgagtgtgatgtcgtttgcgcacctgcgcgtgtgcttgtaatttgctggatttgttgtttctttacagaaaaaaaaggatactatactatgtaagtatctacattgttgtaaaaaaaaaa

SEQ ID NO: 129 - DNA, 1790 bp, Festuca arundinacea
caccaacgaaattcgggaggaagaaaggcgctcgcccatctctcccgaaacaaccgctcgccacccgtctccctcccctgccctcgcctccccattccccttcctcttcttcccttggcgacggcctcgtcgatcggacccaatctccaccaaacgcgcctccggatctcgcgcgccgcctcgaaggggatcctcccgtggccgccgtcctcctccgccgctcggctggactgtcgtggagcggggatcgacccgggctctctgtcgctggttgctaaaatggataagctcaatggttctgcgcgtcttatgattgtttcagacctcgatcatacaatggttgatcatcatgacgaagagaacttgtcgttgcttaggtttggggccctttgggagtctgcttactgtcaggattctctacttgtcttctcgaccggaagatcacccactctctataaggaattgaggaaagagaagcctatgctaactccagacatcactattatgtcggtgggcagtgagataacttatggtgaggccatggttcctgatgatggctgggaggaatatctgaacaataagtgggacagaaatattgttcttgaggagaccgctaagtattctgagctgaagcttcagccagagacagaacagcgtccacataaggtcagcttcttggttgacaagaagagtgctcaggaagtgataaagtctctctctgagaagtttgagaaacgtggggtagatgcaaaaataatctatagtggtggccaagaccttgacatattagctcaaggggctggaaagggtcaggcgcttgcatatttactcaagaagttcgcctcatgcgggaaaacacccaacaatactcttgtttgtggtgactctggcaatgatgcagaattattcagcatccctggtgtgcacggtgtcatggttagcaatgcccaagaggaactactccagtggcatgcagaaaatgcgaaggataaccctaaggtaattcatgcaactgagaggtgtgctgctggtattattcaagctattgggcacttcaagctaggacctaatatttctccaagagacattgagtttccttacgtcaaggaggactctttcaagcctacagcggctgttgtgaagttctatgttctctgcgagaagtggcgtagggctgacgttccaaaggctgattcagttatagagtacttcaaaaacatcacggatgcaagtggagttattattcatccctctggcctcgaactttcgatccattcttccatcgatgcgttggcttcatgttatggtgacaaacaagggaaaaagtaccgatcatgggtggacagactagttatctcacagactgcttctgacagttggcttgtgagatttgacttgtgggaggcagaaggtgatgcatgggtgtgctgtttgacaactcttgcgctgaatgtaaagcctgaaacccctgggggtttcgtggtaacacacatccacaagacatggctcaaagaatattccggggatgagcaggcgtccaaactctagactggatctctaccgtcagcgcacgggaaggaaattttcttgagaatcaaataagaagcgcacagaaaacacgagaatttcttttccttgttcataatgttaataagtgctcccagacactacatatatcatactggatgaagtatacggaggtcttgatgcttggcctaatgcttacttgatgtgtaagataaaaatattatatctcgttactggcatgagaagctgaagtaaaaaaaaaa

SEQ ID NO: 130 - DNA, 3633 bp, Festuca arundinacea
gcagagtagcctgcctgctcgccggcgagagatagctagggagggagggtaactagcgcaggaggagcctgctcgcctgccgtcgagatggcggcggggaacgagtggatcaacgggtacctggaggcgatcctggacgccgggtcgaagctgcggccgcagggcgtgcagctgccgccgctggagacggcgccggcgctcgcggccgaggagtccggcgccgcctacaaccccaccaggtacttcgtggaggaggtggtcaggagcttcgacgagcaggccctccacaagacatggacaaaggtggttgcgatgcggaacagccaggagcgcagcaaccggctggagaacctgtgctggaggatctggaacgtctccaggcagaagaagcaggtggagtgggattacacgaaagaggtggcccggcggaagcttgagcaggagctgggcagccgggaggccgccgaggacctctccgagctctccgagggcgagaaggataccaccaccgccaagcctgacgccgcaaccgctcaaccgtccaccgacgatggcgagcaccagcagccacaaccacgcacccggctcgcgaggatcaactccgaggtgcggctcgtctccgacgacgaggaggagcagaccaagaagaggaacctctacatcgtcctcatcagcatccatgggctggtgcgcggggagaacatggagctcggccgagactccgacaccggaggccaggtgaagtacgtggtggagctggcccgtgcgctggcggccacggcgggggtgcaccgcgtggacctgctgacgcggcagatctcctgccccgacgtggactggacctacggcgagccggtggagatgctggagcgcctgtcgtcggcggacgcggacgaggacgacggcgagcagtctggcggcggggcgtacatcgtgcggctgccgtgcgggcccagggaccagtacatccccaaggaggagctgtggccgcacatcccggagttcgtggaccgcgcgctctcgcacgtcaccgaggtggcgcgcgcgctaggcgaccagctccagcctcctcccactccggccgcgggcgacggcgcagccctagtggcagcgcccatatggccgtacgtgatccacggccactacgcggacgcggcggaggtggcggcgaacctggcgagcgcgctgaacgtgcccatggtcatgacgggccactcgctggggcgcaacaagctggagcagctgctcaagctgggccgcatgccgggccccgagatccagggcacctacaagatcgcgcgccggatcgaggccgaggagaccggcctcgacaccgcggagatggtggtcaccagcaccaagcaggagatcgaggagcagtggggcctctacgacggcttcgacctcatggtggagcgcaagctcagggtaaggcagcgccgcggcgtcagcagcctcggcaggtacatgccgcgcatggcggtcatcccgcccggcatggacttcagcttcgtcgagacacaggacacggctgagggggatggcgccgacctgcagatgctcattgcccccgacaaggccaagaaggctctgcctcccatttggtcggacgtgctgaggttcttcacgaacccgcacaagccgatgatcctggcgctgtcgcggccggacccgaagaagaacgtcactacgctgctcaaggcctacggcgagagccgccagctccgggagctcgcgaacctgactttgatactggggaacagggatgacatcgaggacatggccggcggcggcggcgcggtgctcacggcggtgctcaagctcatcgaccgatacgacctctacggccaggtggcctatccaaagcaccacaagcagacggacgtgcctcacatctaccgcctcgctgcaaagaccaagggagtattcaccaacccagctcttgtagagccgttcggcctcacaatcatcgaggctgctgcttacggtttgccggtggtcgcaaccaagaacggagggccggtggacatcctcaaggcgctcaacaacgggctgctggtggacccgcactcggcggaggcgatcaccggcgccctgctgagcctgctggccgagaagtcgcggtgggtggagtgccgccgcaacggcctccgcaacatccaccgcttctcgtggccgcaccactgccgcctctacctctcccacgtctccacctactgcgaccagccctcgccgcaccagcctctccgcgtgcccctcggcctgggctcctcgaccagcttcggcgcagacgactcgctctcggactcgctccgcggcctctcgctccagatatccgtggacgcctccagcgacctcaacgccgcggactccgcggccgccatcatggacgcgctccgccggcgcccggcctccgagaagccggcgagctccggtgccagggcgctcggcttcgcgcccggccggcgggagagcctcctggtggtcgccgtcgactgctacggcgacgacggcaagccggacgtcaagcagctaaagaaggccatcgacgcggcggtgtcggttggtgaatgcgcgggagctaagcaggggtacgtgctgtcgaccggcatgaccatccccgaggccgcggaggcgatcaaggcgtgcggcgccgacgttgccagcttcgacgcgctgatatgcagcagcggggccgagctatgctacccgtggaaggagctcgcggccgacgaggagtactccgggcacgtcgcgttccggtggcccggtgaccacgtgaaatccgccgtgcccaggctcgggagcttggaggagatcgccctcgcaatcgatcgccccgcctgctccgtgcactgccacgcctacgccgccacggacgcatccaaggtgaagaaggtggattcgatcaggaagtcgctgcggatgcgcgggttccggtgcaacctcgtctacacgcgcgcgtgcacgcgcctcaacgtcatccccctctccgcttcccggccgcgcgctctcaggtacctgtcgatacagtgggggatcgatctctccaaggtggcggtgctcgtcggcgagaccggcgacaccgaccgcgagaggctcctcccgggagttcacaagacgctcatcctgccgggaatggtcgcccgcggcagcgaggagctcctccgaggcgacgacgggtacaccatggcggacgtcgtggccatggactcccccaacattgtcacgctcgccgaaggccagtctgcctccgacctcctcaaggccatctgagagcgtgctctgctgctccctgtgctgcttctgttttccacatctgggacgcagtagcttcacttggattgtttcgcctgtgattttggcaggaagatgatgactgcagaattgcatttgcatataccgtatacctgtgcaagcatgagcaaaacatgtcagctaataattctttaatgttttggtcatgcctccgtgaggtatgcttgtgtgcattctataaaagaaaaacgcaagaatgaaagaaagaaatattttcaatgtaagttgatgtttcttcctgacggcttcttacttggattgtctacattaattgtttcaaggaaatacaaggatctcccctctccaaaaaaaaaa

SEQ ID NO: 131 - DNA, 3747 bp, Lolium perenne
ctccgatcccccacccacctcccaatttccccaagccgcatcgcatcacctcgtctcccgagagcaccgcgatggcggggaacgactggatcaacagctacctggaggccatcctcgacgcgggcggcaccgcgggggacatctcggccgcctctgtggccggaggcgatgatgggccgggcgctggcggaggcactgcgggggagaagcgggacaagtcgtcactcatgctccgagagcgcggccggttcaaccccgcgcgctacttcgtcgaggaggtcatctccggattcgacgagacggacctctacaagacctgggtccgcacgtcggccatgagaagcccgcaagagaggaatacgcggctggagaacatgtcctggaggatctggaacctcgctaggaagaagaagcagattgaaggtgaggaagcctcccgtttatcaaagaaacgtcttgaacgtgagaaggctcgtcgagatgctgctgctgatttgtctgaggacctatctgagggagaaaaaggagaaaacattaacggatcatctgttcacgatgagagcacaaggggacgaatgccaaggataggttcaactgatgctattgaggtgtgggcaaatcagcacaaagataaaaaactgtacatagtgctaataagtattcatggtcttatacgtggtgagaatatggagcttgggcgtgattcagatacaggcggtcaggtcaaatatgttgtagagcttgctagggcattaggtgaaacacctggagtatacagagtggatctgctgacaaggcagatttctgcacctgatgttgactggagttacggagaacctacagagatgctgagtccaagaaattctgagaaccttggggatgacatgggtgaaagcagtggtgcttatattgttaggataccttttggaccaagagaaaagtatatacctaaagagcagctctggccccacatacaggaatttgttgatggtgcacttgtccatatcatgcagatgtccaaggttcttggtgaacaagttggtcgtgaacggcgagtatggcctgttgttatccacggacactatgctgatgcaggcgattctgctgctctattatctggggcactcaatgtcccaatggtattcacaggtcattctcttggcagagacaaattagagcaacttttgaagcaaggacgtcaaaccagggacgaagtaaatgcaacatacaagataatgcgtcggattgaagctgaggaactttgtcttgatgcatctgaaattgtaattacaagcactaggcaagaaatagagaaacaatggggattgtacaatggatttgatgtaactatggagaggaaacttagagcaagaacaaagcgtggtgtcagctgctatggtcgttacatgcctcgtatgattgcgattcctcctggcatggagtttagccatattgtgcctcatgatgttgacctggatggtgatgaagcaaatgaagttggctcaggttcaccggatccacctatttgggctgatataatgcgtttcttctcaaaccctcgtaagcccatgattctcgctcttgctcggccagatcccaagaagaacatcactacattggtgaaggcatttggtgaacaccctggattgagaaatttagcaaaccttacactgatcatgggtaaccgtgatgttattgatgaaatgtcaagcacaaatggagctgttttgacctcagtactcaagttaattgacaaatatgatctatatggccaagtggcataccccaagcaccataagcaatctgaagttccagatatttatcgtttggcggcaagaacaaagggggtttttattaattgtgcttatattgaaccatttgggctcaccttgatcgaggctgctgcttatggtctaccgatggttgctacccaaaatggtgggcctgtcgacatacaccgggttcttgacaatggtatccttgttgatccacacaaccaaaatgatattgctgaggcactttataagcttgtttctgataagcacttgtgggcacaatgccgtcagaatggtctggataatatccatcgattttcttggcctgaacattgcaagaactatttgtcacgggttggcacggtgaagcctagacatccacgatggcaaaggagtgatgatgctactgaagtttctgaatcagattcacctggcgattctttgagggatgttcatgatatatctcttaacttgaagctttccttggacagtgaaaaagcaggcaccaagataaatactgaacgaaattccaccaatgccagaagaaatcttgaggatgctgtactaaaattttcaaatgctgttagtgagggcacaaaggatgagtctgatgagaatgctgaggccaccacaggctccaataaatggccatctttacggaggagaaaacacattgttgttattgctgtagattctgtgcaaaatgctgacttggttcagattatcaaaaacctttttgaggcttcacgcaaagaaaaatcatctggtgctgttggttttgtactgtcgacatctcgagcaatatcagagacacttacttttttaacatctgggggcatacaaactactgaatttgatgccttcatatgcagcagtggcagtgatctttgttatccatcttcaagttcggaagacatgcttagccctaccgagcttccatttatgattgatcttgattatcactctcagattgaataccgttggggaggggaaggtttaaggaagacactaattcgttgggcagcagaaaacaacagtcagagtggacaagaagtagttactgaagatgaagaatgttcatccacttactgcatttcatttaaagtgaagaatactgaggctgtccctcctgtgaaggatcttagaaaaacaatgagaattcaagcactgcggtgtcatgtattgtacagccatgatggtagcaagttgaatcttatacctcttctagcatcacgatcccaagcactaaggtacttgtatatacgatggggggtagagctggcaaacatgacagtggttgttggtgaaagtggtgatacagattatgaagggctacttggaggcgtgcacaagaccatcatactcaaaggctcatttaatgctgctccaaaccagcttcatgctgccagaagctattcactggaggatgtcatatcgtttgacaaaccaggaattgcttcagtcgagggatatctcccagatagcttaaaatcagctctacaacagttcggtgtgctgaactaaagtgacaatcttgccatcagcagaacagttaagtagagtatctattctatgtggtccagatcgagaaatgtgcagcaaggcttgtcttcgctgttttaccacgtcttgcatggcagaataagttctggttgaggtttaccttctacaactcttcttgtaaaccaaaagaatttggagctacgaacttggatcagttttttgtccaaggcaaaactcaaggcaataatactgtgccctaccatcagtcacaataaagcaagattgaacatccttcttgagattcgttaatgttttgtaagactagtcatagtggggagtaatttatatgttgtttcatgcattgtattatttattatcttgtaaacccattttgttttggtgtgtgtgatgttattatggtaacatagctagttaccaccctattatatttcttccctcaaaaaaaaaa

SEQ ID NO: 132 - DNA, 3743 bp, Lolium perenne
cacgcgcgcccgtgcgcacacgtatatagcccgatcaatatcaagttgggatctttagcgccggaggagcggagtagcctgctcgccggcgagggtaattagagcaagaggagtctgctcgccgtcaacaaagatggcggcggggaacgagtggatcaacgggtacctagaggcgatcctggacgcggggtcgaagctgcggccgcagggcgtgcagctgccgccgctggagacagcgccggcgctcgcggccgaggagagcagcgccgcctacaacccgaccaggtacttcgtggaggaggtggtcaggagcttcgacgagcaggccctccacaagacatggacaaaggtggttgcgatgcggaacagccaggagcggagcaaccggctggagaacctgtgctggaggatctggaacgtctccaggcagaagaagcaggtggagtgggattacacgaaagaggtggctcggcggaagcttgagcaggagctgggcagccgggaggccgccgaggacctatccgagctctccgagggcgagaaggacaccaccaccgccaagcccgacgccgcagccgctcaaccgtccgccgacgatggcgagcaccagcagccgcagccacgcacccggctcgcgaggatcaactccgaggtgcggctcgtctccgacgacgaggaggagcagaccaagaagaggaacctctacatcgtcctcatcagcatccatgggctggtgcgcggggagaacatggagctcggccgagactccgacaccggtggccaggtgaagtacgtggtggagctggcgcgtgcgctggcggcgacggcgggggtgcaccgggtggacctgctgacgcggcagatctcctgcccggacgtggactggacctacggcgagcccgtggagatgctggagcgcctgtcgtcggcggacgccgacgacgacgacggcgagcaggccggcggcggtgcctacatcgtgcggctgccgtgcgggccaagggaccagtacatccccaaggaggagctgtggccgcacatccccgagttcgtggaccgcgcgctctcgcacgtcaccgaggtcgcccgcgcgctcggcgagcagctccagcctcctccttctccggccgacggcgcggtggcggcgcccatctggccgtacgtgatccacggccactacgcggacgcggcggaggtggcggcgaacctggcgagcgcgctgaacgtgcccatggtcatgacgggccactcgctggggcgcaacaagctggagcagctgctcaagctcggccgcatgccgggccccgagatccagggcacctacaagatcgcgcgccggatcgaggccgaggagacggggctcgacaccgcggagatggtggtcaccagcaccaagcaggagatcgaggagcagtggggactctacgacggcttcgacctcatggtggagcgcaagctccgggtaaggcagcgccgcggcgtcagcagcctcggacggtacatgccgcgcatggcggtcatcccgcccggcatggacttcagcttcgtcgagacacaggacacggctgacggggacggcgccgatctccagatgctcattgctcccgacaaggccaagaaggctctgcctcccatttggtcagacgtgctgcggttcttcacgaacccgcacaagccgatgatcctggcgctgtcgcggccggacccaaagaagaatgtcaccacgctgctcaaggcctacggcgagagccgccagctccgggagctcgcgaacctgacactgatactggggaacagggatgacatcgaggacatggccggtggcggcggcgcggtgctcacggccgtgctcaagctcatcgaccgatacgacctctacggccaggtggcctacccaaagcaccacaagcagacggacgtgcctcacatctaccgcctcgccgccaagaccaagggagtattcatcaacccagctcttgtggagccgttcggcctcacaatcatcgaggctgctgcttatggtttgccggtggtggcgaccaagaacggcgggccggtggacatcctgaaggcgctccacaacgggctgctggtggacccgcactcggcggaagcgatcaccggcgcgctgctgagcctgctggctgagaagtcgcggtgggtggagtgccgccgcaacggcctccgcaacatccaccgcttctcgtggccgcaccactgccgcctctacctctcccacgtctccacctactgcgaccagccctcgccgcaccagccgctccgcgtgcccctcgccctgggctcctccaccagcttcggcgccgacgactcgctctcggactcgctccgcggcctctcgctccagatatccgtggacgcctccagcgacctcaacgccgcggactccgcggccgccatcatggacgcgctccgccggcgcccggcatccgagaagccggcgagctccggtgccagggcgctcggcttcgcgcccggccggcgggagagcctcctggtggtggccgtcgactgctacggcgacgacggcaagcccgacgtcgagcagctgaagaaggccatcgacgcggcggtgtcggttggtgaatgcgcgggagcgaagcaggggtacgtgctgtcgaccggcatgaccatccccgaggccgcggaggcgatcaaggcatgcggcgccgacgttgccagcttcgacgcgctgatatgcagcagcggggccgagctatgctacccgtggaaggagctcgtggccgacgaggagtactccgggcacgtcgcgttccggtggcccggtgaccacgtgaaatccgccgtgcccaggctcgggagcatggaggagatcgccctcgcaatcgatcggcccgcctcctccgtgcactgccacgcctacgccgccacggacgcatccaaggtaagcataacagagcactacttgtagtaaccactaaccagcacggtacatggtctcctccatgcctaagcttctgatgcgtggggttttgggcaggtgaagaaggtggattcgatcaggcaggcgctgcggatgcgcggcttccggtgcaacctcgtctacacgcgcgcctgcacgcgcctcaacgtcatccccctctccgcttcccggccgcgcgctctcaggtacctgtcgatacagtgggggatcgatctctccaaggtggcggtgctcgtcggcgagaccggcgacaccgaccgcgagaggctcctcccgggagtgcacaggacgctcatcctgccggggatggtcgcccgcggcagcgaggagctcctccgaggcgacgacgggtacaccatggcggacgtcgtggccatggactcccccaacattgtcacgctcgcggaaggccagtctgcatccgacatcctcaaggccatctgagagcatgctctgctccttgtgctgcctctgttttccacatcccggacgcagtagctccacttcgattatttcacctgtgattttggcaggaagatgactgcagaattgcatttgcatataccgtatacctgtgcaagcatgagcaaaacatgtcagctaataattcttttatgttttggccatgcctccgtgaggtatgcttgtgtacatactataaaggaacagagagagaaacgcaagaatgaaagagagaaatattttcaatgtaagttgatgtttcttcctgacggcttcttacaatggcttgtctacattaattgtctcaagaaaaaaaaaa

SEQ ID NO: 133 - DNA, 2714 bp, Lolium perenne
cttctcccctcacacgcctcgccatttgttttgtgtcctgagccatggctgccaagctgactcgtctccacagtctccgggagcgccttggtgccaccttctcctcccatcctaacgagctcattgccctcttttcaaagtatgttcaccagggcaaaggaatgcttcagcgccaccagctgctcactgagtttgaagccttgtttgaggctgacaaggagagatatgcaccctttgaagacattctccgtgctgctcaggaagcaattgtgctgcccccatgggttgcactggccatcaggcctaggcctggtgtctgggactacatacgggtgaatgttagcgagttggctgttgaggagctgacagtttccgagtacctggcattcaaggaacagcttgttgatgagcacgccagcagcaagtttgtgcttgagcttgattttgagcctttcaatgcctccttcccacgtccttccatgtccaagtccattggaaatggggtgcagttccttaaccgtcacctgtcttccaagctgttccaggacaaggagagcctctacccactactgaacttcctgaaagcccataaccacaagggcacgacaatgatgctaaacgaccgaattcagagccttcgtgggctccaatcagcccttagaaaggcagaagagtatctaacgagcattcctgaagacaccccgtcctctgagttcaaccacaggttccaagagcttggcttggagaagggttggggcgacaccgctaagcgtgtacaggacaccatccacttgcttcttgatctacttgaggcccctgatccagccagcttggagaagttccttggaactataccaatgatgttcaatgttgttatcctgtctccacacggatattttgctcaatccaatgtgttgggataccctgatactggtggccaggttgtgtacatcttggatcaagtccgtgctttggagaatgagatgcttctgaggattaagcagcaaggccttgacataacccctaagatcctcattgtcaccaggctgttgcctgatgctgttggaactacatgtggccagcggctggagaaagttattgggactgagcacactgacattctccgtgttccattcagaactgagaaggggatcctccgtaagtggatctctcgttttgatgtctggccatacctggagacatacaccgaggatgttgcaaacgaactcatgagagaaatgcagaccaagcctgatctcattattggcaactacagtgacggtaaccttgtcgccactctgcttgcgcataagttgggagttacccagtgcaccattgcccatgctttggagaaaacaaaataccccaactcagacatatatttggacaaattcgacagccaataccatttctcatgccagttcactgctgaccttattgccatgaatcacactgatttcatcatcaccagcacattccaggaaattgctggaagcaaggacagcgtgggccagtatgagtctcacattgctttcaccctccctgatctctaccgtgttgtccatgggattgacgtgttcgatcccaagttcaacattgtctctcctggagcagatatgactgtctacttcccatacactgaaactgacaagaggcttactgccttccaccctgaaattgaagagctcctttacagtgatgttgagaactctgaacacaagtttgtattgaaggacaagaacaagcctatcatcttctcaatggctcgtcttgaccgtgtgaagaacatgacaggcttggttgagatgtttggtaagaatgctcatctgaaggatttggcaaaccttgtgattgtcgctggtgaccatggcaaggagtccaaggatagggaggagcaggctgagttcaaaaggatgtacagtctcattgaggagtacaagctggagggccatatccggtggatctcagctcagatgaaccgtgttcgcaatgcagagttgtaccgctacatttgtgacaccaagggcgcatttgttcagcctgcattctatgaagcatttggcctgactgttgtcgaggccatgacatgtggtttgcccacaatagcgacatgccatggtggcccagctgaaatcattgtgaatggtgtgtctggtttgcacatcgatccttaccacagtgacaaggctgcagatatcctggtcaacttctttgagaaatccacggcagatccaacctactgggacaaaatgtcggaaggtggcctgaagagaatttatgagaagtacacctggaagctgtactcagagaggctgatgaccctgactggtgtatatggtttctggaagtatgtgagcaaccttgagaggcgtgagactcgccgttaccttgagatgttctacgctctgaagtaccgcagcctggctgctgcagttccattggccgtcgatggcgagaacacggacaattagtgcgggacatgaagaggcgccttcaaagggcgaggtgtcggctgcgttatgatttgattgtctaccggagttttcatttggtctattgtggagtgtgtacttggatgtctcaggcacttctgtgaggttttgggcagttctttgctggttcctgctagctgcatatgttgtcttcaataaacgcctgcccgtattgttcatctcttataattcaatgcaatcttctgttgcctaaaaaaaaaa

SEQ ID NO: 134 - DNA, 2957 bp, Lolium perenne
cggtttcttcctcgtggtgcgttgcgtttgtcgggttcttctgaagaagcggaaggtttgagcaatgggggaagccgccggcgaccgtgtgctgagccgcctccacagcgtcagggagcgaatcggcgactccctctccgcccaccccaatgagctcgtcgccgtcttcaccaggctggtcaaccttggaaagggaatgctgcagccccaccagatcatcgctgagtacaacactgcaatccctgaagcagagcgcgagaagctcaaggacggcgccttcgaggatgtactgagggcagcgcaggaggcaatcgtcatctccccatgggttgcacttgccatccgccctaggcctggtgtctgggagtatgtgagagtcaacgtgagcgagcttgctgtcgaggagttgagtgtccctgagtacttgcagttcaaggaacagcttgtggaaggaagcaacaaagacttcgtgcttgagctggactttgagccattcaatgcctccttccctcgtccttccctgtcgaagtccattggcaacggtgtgcagttcctcaataggcacctgtcatcaaagctcttccatgacaaggagagcatgtaccctttgctcaacttcctccgtgcacacaactacaagggcatgcctatgatgatgaacgacagagtccgcagtctaagtgctctccagggagctctgaggaaggccgaggagcatctgtctggtcttccagcagacaccccgtactcggacttccaccacaggttccaagaacttggtttggaaaagggctggggtgattgtgccaagcgtgcgcaagagacccttcacctgctcctcgaccttcttgaggcacctgacccgtccacacttgagaagttccttggtacaatcccaatggtgttcaatgttgtcatcctctctccacatggttactttgcacaagccaatgtcttggggtaccctgacaccggagggcaggttgtctacattttggatcaagtccgtgctatggagaatgagatgcttttgaggatcaagcagcaaggactcgatatcacaccacggatccttattgttaccaggcttctccctgatgcaaccggtacgacctgcggtcagcgtcttgagaaggtcctcggtactgagcacacccacatccttcgtgtgccattcagaactgaaaatggaattgttcgcaaatggatctcacgttttgaagtctggccatacctggagactttcactgatgatgtggcgcacgagatttctggagagctccaggccaaccctgacctgatcatcggaaattacagtgatggaaaccttgttgcatgtttgcttgcacacaagatgggcgttactcattgtaccattgcgcatgcgcttgagaaaaccaagtaccccaactctgacctgtactggaagaagtttgaggatcactaccacttctcatgccagttcaccactgacttgattgcaatgaaccacgcggacttcatcatcacaagtaccttccaagagattgctggaaacaaggacaccgttggtcagtacgagtctcacatggcattcacgatgcctggaatgtaccgtgttgtccacggtatcgatgtttttgaccccaagtttaacatagtttcgcctggtgcggacatgtccatctacttcccgtactcagagtcacaaaggaggctcacctcactccacccagagattgaggagctgctctacagtgatgtcgacaacgatgagcacaagtttgttctgaaggacaggaacaagccaatcatcttctcgatggctcgtctggaccgtgtcaagaacttgactggtctggttgagctgtatggccggaaccctcgcttgcaggagcttgttaaccttgtggttgtttgtggtgaccatggcaacccatcaaaggacaaggaggagcaggctgagttcaaaaagatgtttgaccttattgaacagtacaacctgaatggccatatccgctggatctctgctcagatgaaccgtgtccgtaatgctgagctctatcgctacatctgcgacaccaagggtgcttttgtgcagcctgcattctatgaggctttcgggctaactgtcatcgaggccatgacctgtggtcttccaacatttgcaactgcatatggtggtccagctgagatcatcgtgaacggtgtctccggctaccacattgatccttaccagggtgacaaggcctcggctctgctcgttgagttctttgagaagtgccagggagaccacagccactggaccaagatctcactgggagggcttcagcgtattgaggagaaatacacctggaagctttactctgagaggctgatgaccctcaccggtgtctatggcttctggaagtacgtctccaaccttgagaggcgtgagacccgccgctacctggaaatgctgtacgcgctcaagtaccgcaccatggccagcactgttccattggctgtcgagggggagccctcgagcaagtgatctggccacctatcggccggaagaagaagaagaaggttggcttcgatttctgaaagatttgagatttgagaatgcgttggttttcttcctaggcgctgctcttttagagttaaggtcgagttgatgtgctagtttgattcagcagtgggagtgagttgagacagaaggatgtggtgtgtgccagtattgttggtgcttttcgtgttctttggatgttacccttgaataatagtagcggccttggcgccgtttctgaaataatagtagcatccttgctcgttgccaagaaaatcttagtttttttttctcttgaacaagtggcaaagcgacctctgcatctatctctgtcattgacatttagctctgttgcggtgcactggataccttacattgctctagagaacagcaataaaagccggaccatgtgattgctgtaaaaaaaaaa

SEQ ID NO: 135 - DNA, 1986 bp, Festuca arundinacea
gaaacttctcatcccacaggccacagagcatccccacacatcctatctccctcctcgtgctccttctgtcgccatggcccaagcttgggccttcttcctcctcgccctcttctccttctcctcctatgtatccaggatcttcctctgcagcaggaatggcgagggatccttcctctgtgcacgggcaccagaggtcccctccattgctagcgacaggtaccggaccgcctaccacttccagccccacaagaactggatgaatgatccaaatggaccgatgtactacaatggcatctaccatttattcttccagcataaccccaatggcccccaatggggtgacatagtctggggccattcggtttcgaccgaccttgtcaactggatcatacttgaacccgcaatagaaccggatacaccaggtgacataaaaggttgctggtccggctcagccacagttatatctggtagtcaaccggtcatcatgtacaccggtggcgatgtagagaatcatcaggttcaaaacattgcgcttcctaagaaccggtctgacccgtaccttatagaatggaccaaggcatgcaataacccagtgctccaaccggttggaccaggaatgaacccaggcgagttcagggatccgacgacaggttggatcgggccggatggactatggagaatatcaattggagctgaggtgaacggttacagtgcagcacttttgtacaagagtgaagactttctgaattggagtagagttgatcacccactgtattcatccagtgcctccactatgtgggagtgcctggacttcttcgcggtattaccgggcagtaacggtggactggacctgtccgcagctattccgaaaggcgccaaacatgtcctcaaagtcagcgtggatcaatgtgacaagtacatgattggggtttatgatctcgaacatgatgcttttgtgcctgatactatcctcgatgaccgttggttgttgccgaggatcgattacggcaattactatgcttcaaaatcgttcttcgactcgaaaaataggaggaggatcatatggggttggactaatgagtcagatagttcttcagatgatgtcgcaaaaggctgggcaggtatctatgcaattcccaggacaatttggctagaccgtgatggcaagcagttgctgcaatggccagttgaagagattgagtcccttcgaagaaatgaaatcaactatcaaggactagatctggagaagggagatctttatgagattaagggagttgacactttgcaggctgatgtggagatagattttgagctgacgtctattgatgatgccgactcttttgatccttcctggcttttggatcccgaaaagcattgccgggaagcgggtgcatcagttcatggtggtatagggccatttggacttgttattctggccaccggcgacatggaggagcacactgttgtgcacttcagagtctacaaatcacagaaagaatacatgatactcatgtgctctgatataagaaggtcttccctgagacaaggactgtacgcacctgcctatggaggcttctttgaatttgatcttgaaaaggaaaggaagatatctctgagaactctaattgatcggtcggcggtggagagctttgggggcggtggcagggtctgtatcatagctagagtttatccagtggcgattgtcgatgacgggagtgcccacatgtatgccttcaacaatggaagtaccacggtcagggtgccacagatcagggcatggagcatgatgacagcacaagtgaatttaaagaaaggctgaagtgatgattaacacagaaaagctaattccttttattgattctttctcttattcatgagcactcattcgtacaaataaacggaaattcaacaggcatatgtaattgattgtttccttgatctcaattattcatatactataattattattaaaaaaaaaaaaaaaaa

SEQ ID NO: 136 - DNA, 2073 bp, Lolium perenne
gaaaactagattattgtccagtctccttgacttgcattaaactttgcgatctggacggctataactgcgccctgaaagccttctgcaatttacacatcgatcggccagcccatccatcagtacctttgtcccctcttggtcttcctctccgattccgattcgcaccaccatgaatggaatcgagcacccgggcaatggccggaccgcctaccacttccaaccggcgaagcattggcagaatgatcccaatgggccaatgtaccacaacggcctgtaccacttcttctaccagtacaatccccacggcccgacctgggacaccggcaagttatcatggggtcactccgtctccggcgacctcgtgaactgggccgccctcgacaatgctctcgaccccaccgccccgttcgacgccaacggctgctggtccggctccgccaccatcctccccggcggccgcccggccatcctctacaccggcatcgacgccgacaaggtgcaggtgcagaacgtggcattcgccaaggacccctccgacccgctcctccgcgagtgggagaagcccagctgcaacccggtgatcccgtaccccgccgacgtgacgggcaacaacttccgtgatccgacggaggcgtggcgcggccgcgacggcctgtggcgggtcggcatcgtcgccgaggtgaagggcgtggggtccctgctcgtgtaccggagcgcggacttcctccgctggcagcgcaacgccgcgccgctgcacgccagctcgcgggacgtgcccgtgctggagtgcccggacctgttcccggtggctgcggcggcgcagggcgcgacggaggggctcgagacttcggcaccgagcggcgccggggtgaggcatgtgctcaagctcacggacttcgccaaggaggaccactacatggttgggttttacgacgacgtggcggacaccttcgtgccggcggagcccgagcgcggcgacgaccccgacaactggcgccggctcgaccacggccacctgtacgcgtccaagtccttctacgacgcgcgcaacaagcggcgcatactgtgggcgtgggtggacgagaccgacggtggcggcgtcgccaggggctgggccggcatccaggcgttcccgagggcgatgtggctggacgccgacgggaagcggctggtgcagtggcccgtggaggagatcgagacgctgcggaggaagcgggtcggcctgcggtgggcgacggacgtggaggccggcggcaggaaggagatcgccggcatcgtgagctcgcaggcggacgtggaggtcgtgttcgagatcccgaacctggaggaggccgagacgttggaccccgagtgggtgctggatccgaaagggctgtgcgcggcgaagggcgcgtccgtgcacggcggcgtcggcccgttcgggctgctcgtcttggcctccggtgacctggaggagcacactgctgtgttcttcagggtgttcaagcacgatggcaagtacaaggttctcatgtgcaccgatctcacaaagtcatctacgaaagcaggggcacacaagccatcctatggagcatttcttgatgtggacgtggagaaggacaagttcatatcgctcagaacattgatcgatcacacggtggtggagagcttcggcgacggcgggaggacgtgcatgacggctcgtgtgtaccccgaacacgcggcgatgggaagcacccacctgtacgtgttcaacaacgggacaggtgccgtaaaggtgtccaaacttgaggcgtgggagctggcgacggcggccgtgaacggcggctcgcttgcacccgtcgtcgtcaaggcatccgaccctaaagaggccttgtagttctagggtatgcccgggatggtggctgcttagatgatgtccgtcgttgatttatgcttgttggtcgagttatgagtttcgggtaggatgatttatgcggaaatgcaattttagtggcgtcatgacctattggacaaacatctgtcattggaaaaacgtggtgatatgtccacgcccatatctaaaggtataatagaggcatcccaaaaaaaaaa

SEQ ID NO: 137 - DNA, 1888 bp, Festuca arundinacea
gaaaatctccttcagctcctgccctccatggcccatgcttgggccttctttctccttgccctcttctccttctcctcctgtgtgtccaagctcttcatctacagcaggaatggcgagggatccttcctctgtacacggtctccggaggtcccctccattgccagcaagaggtacaggactgcctaccacttccagtctcccaagaactggatcaatgatccatgtggacccatgtactacaatggcatttaccatgaattctaccagtataaccccggtggcaccatcgcggctaacatagtttggggccattcggtttcaaccgaccttgtcaactggatccagcttgaacctgcaatagtacgggataccccatatgacatacacggttgctggaccggctcaatcacaattctacctggtgatcagccggtcatcatatacaccggtcgtgactcggacaatcatcagagccaaaacattgagctccccaaaaaccgatctgacccatacctgagggaatggaccaaagcagacaataacccgaggatcctaccggttggaccagacttgaacttgacccagttcagggatccgacaaccggttggattggaccggatggactatggagaatagcaattggtgctgagctgaatggctacggtgccgcacttttgtacaagagtgaagactttctgaattggactagagttgatcacccactgtattcagacaatgccccctcaatgtgggagtgcccagatttcttcgccgtattgccaggcaataacggtggactggacctgtctgcggcgatcccgaaaggcgccaaacatgtcctcaagatgagcgtggattactctgacaagtacatgattggggtttatgatctcaaacgtgatgcctttgttccggatgttgtcctagatgaccgtcggctgtggttgaggattgattacggcacattctatgcttcaaaatccttcttcgactcgaaaaggggcaggagggtcatatggggttggtccaacgagacagatagtgtttcagatgatggtgcaaaaggttgggcaggtatccatgcaatccccaggtcaatttggttagacagcgatggcaaacagttgctgcaatggccgattgatgagattgagtcccttcgaagagatgaaatcaaccatcaaggactagagctgaagaacggagacctatttgagattaagggaattgacactttgcaggctgatattgaagtagattttgagctgacgtccatcgacagcgccgatccttttgatccttcctggcttttggatgtcgagaggcattgccgggaagcaggtgcatcggttcaaggtggcatagggccatttggacttgttgtcctggcgtctgacaacatggaggagcacattgctgtgcacttcagagtttacaaatcacagaaaagccacatgatcctcatgtgctctgatctaagaaggtcttctctgagatcaggactgtacacaccagcctatggaggcttctttgaatttgaccttgaaaaggaaaggaagatatctctcagaactctgattgatcggtcagcggtggagagctttggcggcggtggcagggtctgcataacggccaggatttatccagtggcgcttgtcgacggcagggtccacatgtatgccttcaacaatggaagtaccacggtcagggtgccacaactcggggcatggagcatgatgacagcacaagtgaacgtgaataagggttgaagtgatggttaacacagaagagcagtttcattttcttaattagcgtactctcattcaggagcactccttggtacaattgaaaggaaattcgacaggaagtagttggtcaaaaaaaaaa

SEQ ID NO: 138 - DNA, 1849 bp, Lolium perenne
aaagttcatccctccttctgtccccatggcccaaggttggcccttcttcctccttgtcctcttctcctcctgtgtatccaaccacctcgtcaatggagaaagggtcttcctcttcccccagtctcacaaggtctcctccattgtcagcaagaggtataggactgcctaccacttccagccccccaagaactggatcaatggaccaatgtactacaatggtatctaccatgagttctaccagtacaaccccaatggctccctctggggtaacataatttggggccattcagtttcgacggacctcatcaactggatcccagtagaacctgcgatagaacgggatatcccaagtgacataaacggttgctggaccggctcagccacaattatttccggtgatcaaccaattatcatatacaccggagccgacaaggagaaccgtcagctccagaacattgtgcttcccaaaaacaagtctgacccgtatctgagggagtggacaaaagcaggtaataacccggtgatccaaccagtcgggccaggcttgaatgcgagccagttcagggatccgacaaccggttggattggaccggatggactgtggaggatagcagttggtgctgagcttaatggctacggtgctgcacttttgtacaagagtcaagactttctgaattggactagagttgatcacccgctgtattcatccaatgcatcctcaatgtgggagtgcccagattttttcgcggtattgccgggaaatagtggtggacttgacctatctgcagaaatcccaaatggcgccaagcatgtcctcaaaatgagcctagattcctgtgacaagtacatgatcggagtttatgatctgaaaagtgatacctttatgccagatagtgtgttagatgaccgtcgactgtggtcgaggatcgatcatggcaatttctatgcttcaaagtcattcttcgactcgaaaaagggaaggaggatcatatggggttggacaaatgagacagatagctcttcagatgatgttgcaaaaggttgggctggaatccatgcaattcccaggacaatatggttagacagttatggcaagcagttgctgcaatggccaattgaagagatcgagtcccttcgaagaaatgaaatcagccatcaaggactagagctgaagaaaggagacctatttgagattaaaggaactgacacttcgcaggctgatgtggaggtagattttgagctgacatccattgataatgccgacccttttgatccttcctggcttctggatgtcgagaagcagtgccgagaagcaggtgcatcggttcaaggtggcatagggccatttggacttgttgtcttggcctctgacaacatggaggagcacactgctgtacacttcagagtttacaaatcgcagcaaagctacatgatcctcatgtgttctgatctaagaaggtcttccctgagatcaggaatgtacacaccagcatatggaggcttctttgaatttgaccttcagaaggaaagaaagatatctctgagaactctgattgatcggtcagcggtggagagcttcggaggcggtggcagggtctgcatcatggccagagtttatccggtggtgcttgtcgatgatggcggggcccacatgtacgccttcaacaatggcagtaccacggtcagggtgccacagctcagggcatggagcatgagcagggcagagcacaagtgaatgtaaagttaaagtgatgattaacatagaagagcaaatctaattgacctgtgattggaggactggaaaagtgatttaaatgcttagcacaattgtttcttgataaaaaaaaaa

SEQ ID NO: 139 - DNA, 2166 bp, Lolium perenne
gggaccttgcgcccaagtacgtagtctgacagcaatgggggttcgtctcgggagagtagcttgggcgtgcccggcggttctggtgctgctcttgcagctcgccggagcgtcccatgtcgtctacgagaccagcctcctcgagaccgaggcggcggcggccaccgtgccagcctccatttttgagctgagcaccgggtaccacttccggcctcagaagaactggatcaacgatcccaacgcgccgctgtactacaagggttggtaccatctgttcttccagtacaaccccaagggcgcggtgtggggcaacatcgtgtgggcgcactcggtgtcgcgcgacctcatcaactgggtggccctggagacggccctggcgccgagcatcgacgccgacaaatacggctgctggtcggggtcggcgaccatcatgcccgacggcacgccggtgatcatgtacacgggcgtcagccggccggacgtcaactacgaggtccagaacgtcgccttccccaagaacagctcggaccctctcctccgggagtgggtgaagccggcgcacaacccggtgatcgtcccggagggcggcatcaacgcgacgcagttccgggacccgaccacggcctggtacgcggacgggcactggcggatcctggtgggcgccctctccggcgcgtcccgcggcgtggcgtacgtgtaccggagccgcgacttccggcggtggacgcgggtgcggaagccgctgcactcggcgccgacggggatgtgggagtgcccggacttctacccggtgaccgtggacggcaaggagagcggggtggacacgtccgtggtgtccagctcgagggtgaagcacgtgctcaagaacagcctcgacctccgccgctacgactactacaccgtcgggacctacgaccggctgaaggagaggtacgtgccggacaaccccgccggcgacaagcaccacctgaggtacgactacggcaacttctacgcgtccaagacgttctacgacccgtccaagcgccgccgcatcctgtggggatgggcgaacgagtccgacaccgccgtcgacgacgtcgccaagggctgggccggaatccaggcgattcctcggaaggtttggctggacccaagcgggaggcagctgatgcagtggccggtggaggaggtggaggcgctcagggggaagaagccggtcagcctcaaggaccggatggtgaagcggggagaacacgtcgaggtcaccgggctacaaaccgcacaggctgacgtcgaggtgagcttcgaggtgccgagcctggagggggcggaggcgctggacccggcgctggccaacgacgcccagaagctttgcggcgtgaagggcgccgacgtggagggcggcgtggggcccttcggtctgtgggtgctggcgtcgtccaagctggaggagaggaccgccgtcttcttcagggtgttcaaggccgcgggcaacgtcaacagcaccaagcccctcgtgctcatgtgctccgatccaaccaagtcatctctgaacaagaacctgtaccacccgaccttcgcgggcttcgttgatattgacatggctaagggcaagatttctctcagaagcctgatcgatcaatccgtcgtggagagctttggggccggaggcaggacgtgcatcctctctcgcgtctacccgtcgctcgccattggcaggaacgctcacctccacgtcttcaacaacggcaaggcggacatcaaggtgtcgcggctcacggcgtgggaaatgaagaagccggcgctcatgaacggtgcctagatttagattcaggcaggagcaccatatgcatgattcctacatatgtgcttgaatttggctcaggcatgcgtctggggcgttattctgatgttaatttgacctctggtgaaacatgctagttttacaagggcgcgtacgtagctagctaggtttgcacgctgtgtaagtgaagggggtcattttgtatgcccccgggaataataaagatccatgcatagcctgaggtgggcatcggtagaaagttatttttctgaaacggggcaaaatatttgctccaatcaactactcctggcatggattaaaataaggagcaacaaagtagaagttttacaagaaagttaatgttttgattattaaaaaaaaaa

SEQ ID NO: 140 - DNA, 2137 bp, Lolium perenne
ccctcgcactagtcggccgaggcattcttcctagttgcttccatcgcatcgatctcgatccacagattctatgccaatggaggcaagagatggcgtctcgatgccctactcgtatgcggccctgccggaggacgccgaggcagcggtggttgggcgcggtcgccggaccgggcctctgttcgcagcgttgctgttgacgttggtcgccgcgctccttgccgtcgccgcgctggctggcgtcaggctcgttggcgagctgcctgccgggggcgtcgtcatgcccaaccacccgatggaagtcatggacgtcagcggtagcagagggcctgagtcaggcgtgtcggagaagacgtccggggccgccagcgagagcggcggcatgctgggcgccgacgccggcagcaacgcgttcccgtggagcaatgcgatgctccagtggcagcgcaccggcttccacttccagcccgagaagaactggatgaacgaccccaacggtccggtctactacaaggggtggtaccacctcttctaccagtacaacccggagggcgcaatctggggcaacaagatcgcgtggggccatgccgtgtcccgggacatgctccggtggcgccacctgcccatcgccatgttccccgaccagtggtacgacatcaacggcgcatggtcaggctccgccaccgtgctccccgacggccgcatcgtcatgctctacacgggctccaccaacgcctccgtgcaggtccagtgcctcgccttcccctccgacccctccgacccgctgctcaccaactggaccaagtatgagggcaacccggtgctgtacccgcctccgcacgtcggggagaaggacttccgggacccgaccactgcatggtacgatggctccgatggaatgtggcggatcgtcatcgggtccaaggataaccgccgcgccggcatggccttgacctacaagaccaagaacttccatgattttgagctcgttcccggagtgctgcaccgggtgccggcgacggggatgtgggagtgcatcgatttgtacccggttggcggcgcgaggggcattgacatgacggaggccgttgcggcggcatccaacagcggtggtggtgaagttttgcatgtcatgaaggagagctcagacgacgaccgacatgactactacgcgctagggaggtacgatgcagcgacaaacaagtggacaccgctagatgccgacgccgatgtcggcatcgggctgaggtacgattggggaaagttctacgcatccaagaccttctatgacccggccaagaagaggcgtgtgctatgggggtgggtcggcgagactgactctgagcgcgccgacgtggccaagggatgggcttccctacagtcgatccctcgcacggtggtgctagataccaagacgggcagcaaccttatccagtggccggtggtcgaggtggagacgctccgtaccaactccaccaatctcgggagcatcatcgtcgagcatggctccgtcttccctctcagtctccaccgggccacacagctcgacatcgaggcttccttccgcctggacccgctcgatgtcgccgccgcaaaggaggccgacgttggctacaactgcagcaccagcggtggcgcggccggtcgtggagcgctcggtccctttggcctgctcgtactcgccgatgccaggcgccatggcggggacacggagcagaccgccgtctacttctacgtcgcgaggggcctcgatggcaacctgcgcacgcacttctgccatgacgagtcacggtcatcccgtgccaacgacattgtcaagagggtcgttggcaacatcgtgccagtgctcgacggagaggcgctgtctgttagggttctggtggaccactccattgtcgagagcttcgcacagggtgggaggtcggtggtgacttcacgagtttacccgactgaggccatctacgccaatgccggggtatacctcttcaacaacgccaccggtgcccgggtcaccgccaccagtctcgtcgtccatgagatggacccctcctacaaccagaaccaggccgagatggcttcattgtaaatcgaaaatgtacatattgttttttgtgctagcatgttgcccgtaaaaaaaaaa

SEQ ID NO: 141 - DNA, 1954 bp, Lolium perenne
gaaagctttctttcctgtttgctcgctggtgcggccggcggcgtaccttctccggcgacgacatgcatgcagatcccaacggtccggtctattaccgcggatggtaccacctcttctaccagtacaaccccgagggggcggtctggggcaacatcgcgtggggccacgctgtctctcgggacctagtccactggcgccacctcccgctcgccatggtgcctgaccagtggtacgacatcaacggtgtctggacaggctccgccaccgtgttccccgatgggaccctgaacatgctctacacggggtccaccaatgcctccgtgcaggcccagtgcctcgccgtgcccgaggaccccaatgactccctcctccgcaactggaccaagcacgaagccaacccggtcctcctcccaccgcccgggatcggtgacaaggacttccgtgacccaaccaccgcatggttcgacgagtctgaccagacgtggcgcaccgtcatcgggtccaaggacaacaacggccacgccggcatcgccatggtgtacaagaccaaagacttcctcaactacgagctcatcccgggatacttgcatcgcgtcgacggcaccggcatgtgggagtgcatcgacttctaccccgtcggcggcaagaacggcagcgaggagctgtacgtgatcaaggagagcagcgacgacgaccgacatgactggtacacgctagggaaatacgacgcggcagccaacacgttcacggccgcggacccggagaacgacctagggattgggctgaggtacgactggggcaagttctacgcgtccaagaccttctacgacccagccaagaagcggcgcgtgctgtgggggtggattggcgagaccgactccgagcgcgccgatgtcgccaagggatgggcatccctcatgtcgattccgaggacggtggagctcgacgagaagacctggaccaacctcatccaatggccagtggaggagatcgagaccctccgcatcaagtccaccgaccttggtggcatcaccattgaccacggcagcgtctacccactccctctccaccgcgccacacagctagacatcgaggcctccttccgcctcgacgccgccaccgtcgccgccctcaacgaggctgacgtaggctacaattgcagcaccagcggcggctctacccaccgcggcgcactcggcccctttggcatcctcgtccttgccgacggtaaggcggagcaaacggcggtgtacttctatgtgtccaagggccttgacggggccctcgagacccacttctgccacgacgagtcgcgatcgacgctggccaaggatgtcgtgaagcgagtggtgggatacaccgtgcctgtcctcgatggtgaggcattttccgtgagggtgctcgtggaccactcaattgtggagagcttcgccatgggtggaaggtccacggcgacgtcgagggtgtacccgacggagtctatctacggcgctgctggtgcatatcttttcaacaatgccaccggcggctccgtgaccgttgagaagctcgtggtgcatgagatggactcgtcctacaaccagatcttcatggctgacgacttgtagtcaccgtcatccatggatagcgtcggatggtgaggatgatcacctactacatatacatacatactattgatcgaacgatcaccggatcggtcggtggtggcttcctctttctcttggatgcagaaggagatggagtactagctactctatttaccatgttgttgttttgttggttttttggggtttgggtttttgacgagatggatgaattagctatagatggatgattgtgtcctattttctctcctgccttccgagtgtaactacatatattggcaggatcgatgatatccctgttgcatgacagtgatgattaattattgtgatgatattgatcaaaaaaaaaa

SEQ ID NO: 142 - DNA, 2039 bp, Lolium perenne
aggaggtggtggaggagcacgaaatcccggccgccattcctccaccttccgctccgaccaaagatttccatccggcgagatccatgggctccatcgcggcagacttggcgccggaggcgcccgcggagctggtgttccggtcgaagctcccggacatcgagatcccgacccacctgacgctgcaagactactgcttcgagcgcctgccggagctctccgcccgcgcctgcctcatcgacggcgccacgggcgccgcgctcacctacggcgaggtggacgccctctcgcgccgctgcgcggccgggctgcgccgcctcggcgtccgcaagggcgacgtggtcatggcgctcctccgcaactgccccgagttcgccttcgtgttcctcggcgcggcccggctcggcgccgccaccaccaccgccaacccgttctacacgccccacgagatccaccgccaggccgccgcggccggcgccaaggtgatcgtcaccgaggcctgcgccgtcgagaaggtgcgcgccttcgccgccgagagagggatccccgtcgtctccgtcgacgaggccgtcgacgacggctgcctcccgttcgccgcgactctcctcggggaagaaagcggcgagcggttcgtcgacgaggcggtcgaccccgacgacgtggtggcgctgccgtactcgtccggcaccaccggcctgcccaagggcgtcatgctcacccaccgcagcctcgtcaccagcgtcgcccagcaggtggacggtgagaacccgaacctgcacttcagctcgtccgacgtgctgctgtgcgtgctgccgctgttccacatctactcgctcaactcggtgctgctcgccggtttacgcgccgggtgcgcgatcgtgatcatgcgcaagttcgaccacggcgctttggtggacctggtgcgcgcgcacggcgtcacggtggcgccattcgtgccgcccatcgtggtggagatcgccaagagcgcgcgggtgaccgccgcggacctggcgtcgatccggctggtcatgtcgggggcggcgcccatgggcaaggagctgcaggacgcgttcatggccaagatccccaacgctgtgctcgggcagggatatgggatgaccgaggccggccccgtgctagccatgtgcctggccttcgccaaggagccgttcgaggtcaagtctggctcctgcggcaccgtcgtccggaacgccgagctcaagatcgtcgaccccgacaccggcgcctccctcggccgcaacctgccgggggagatctgcatccgcggcaagcagatcatgaaaggttacctaaatgatccggaggccacaaagaacaccattgacaaggacggttggctgcatactggagacattggttatgtcgatgatgacgacgagatctttattgtcgacagactgaaggagataatcaaatataagggattccaagtacctccagcagaacttgaagcccttctcattacgcaccctgaaatcaaggatgctgctgtcgtatcgatgcaagacgaacttgctggtgaagttccggttgcgtttgttgtgcggactgaaggttcagagatcagcgaaaacgagatcaagcagttcgttgcaaaagaggttgttttctacaagaggatctgcaaagtgttcttcgcggattccattccaaagagtccatctggcaagatcctcaggaaggacctgagagcaaagctcgccgcaggcattcccggcagtgataccacacagtccaaaaactaagtcagatatattgtttcccaaccttacacacctctgtccaacaccatgtaatgttcttaatataaacggaaattattacatatagaagggctgattctttttactagatgtgtccaacatatgatatgtttgttaggccgatgatgtgtaacctgtcatgtatagataccgcctttttttgataagaaaggctgattataatgtataccatgagctgaatatttgttcaaggagatcaggattcggttgccaattgtttaccttttaaaaaaaaaa

SEQ ID NO: 143 - DNA, 2006 bp, Lolium perenne
gagagaggagatcaagcaagccatctcccacgactaatttagaagaagatttacttagtctctgcttctcgctcgatcgccggccggtgaggtagctagctagctactcgtactagatcattaccatgggttccgtgccggaggagtcagtggtgtccgtggccgcggcggagacggtgttccggtcgaagctccccgacatcgagatcaacaacgagcagacgctgcagagctactgcttcgagaagatggccgaggtcgcgtcccgcccctgcatcatcgacggccagacgggcgcctcctacacctacacggaggtcgactccctgacccgtcgcgccgcggcggggctgcgccgcatgggcgtggggaagggcgacgtggtgatgaacctgctccgcaactgccccgagttcgccttctccttcctgggcgcggccaggctgggcgccgccaccaccaccgccaacccgttctacaccccgcacgagatccaccgccaggcggaggcggcgggcgccaagctgatcgtcaccgaggcctgcgccgtggagaaggtgctggagttcgcggcggggcggggcctgcccgtggtcaccgtcgacgggaggcgcgacgggtgcgtggacttcgcggagctgatcgccggcgaggagctgcccgaggcggacgaggccgggatcctccccgacgacgtcgtcgccctgccctactcctccggcaccaccgggctccccaagggcgtcatgctcacccaccgcagcctcgtcaccagcgtcgcccagctggttgacgggtcgaacccaaacgtgtgcttcaacaaggacgacgcgctgctgtgcctgctgccgctgttccacatctactcgctgcacacggtgctgctggcggggctccgcgtcggcgccgccatcgtcatcatgcgcaagttcgacgtcggcgcgctggtggacctcgtccgcgcgcaccgcatcaccatcgcgccattcgtgccgcccatcgtcgtggagatcgccaagagcgaccgcgtcggcgccgacgacctcgcatccatccgcatggtgctctccggcgccgcgcccatgggcaaggacctccaggacgccttcatggccaagatccccaacgccgtgctcggacagggttacgggatgactgaggccgggccggtgctggccatgtgcctggcgttcgccaaggagcccttcaaggtcaagtccgggtcgtgcggcaccgtggtgcgcaacgcagagctcaaggtcgtcgaccccgacaccggcgcatccctcggcaggaaccagcccggcgagatctgcgtccgcgggaagcagatcatgataggttacctgaacgacccagagtctaccaagaacaccatcgacaaggacggctggctgcacaccggagatatcggcttggtggacgacgacgacgagatcttcatcgtcgacaggctcaaggagatcatcaagtacaagggcttccaggtggcgccggcggagctcgaggccctcctcctcacgaacccggaggtcaaggacgccgccgtcgtaggggtgaaggatgatctctgcggcgaagtcccggtcgccttcattaagaggatcgaaggatctgagatcaccgagaacgagatcaagcaattcgtctcaaaggaggttgttttctacaagaggatcaacaaggtctacttcaccgactccattcccaagaacccttccggcaagatcctaaggaaggacttgagagccaggctcgccgctggcatccccaccgaagttgccgcgccgagaagctaagggccgcttctcaggaacgcaatcacccatggtgctgtttaggtgctgttatagaccacaccaaatggggaaagaaactacgggaggggatcatattattcttgcaggagatatcagtttgttgattcgccctgcttgtgtaatgttgataaaatgaaatgatataatagatgtgttgttttattttttgaccatgtaaaaaaaaaa

SEQ ID NO: 144 - DNA, 1789 bp, Lolium perenne
ctcaacactcgccaatcccacagccacagaagccacctaccaccgctccaccgatcgacgatggaggtcctcctcctggagaaggccctactggggctcttcgcggcggcggtgctggccatcgccgtcgcgaagctcgccggcaagcgcttccgcctcccgcccggcccctccggcgcccccatcgtcggcaactggctccaggtcggcgacgacctgaaccaccgcaacctgatgggcatcgcgaagcggttcggggaggtgttcctgctccgcatgggcatccgcaacctggtggtggtgtccagcccggagctggccaaggaggtgctccacacgcagggcgtggagttcggctcccgcacccgcaacgtcgtcttcgacatcttcaccggcaacggccaggacatggtcttcaccgtctacggcgaccactggcgcaagatgcgccggatcatgaccgtccccttcttcaccaacaaggtggtggcgcagaaccgggtgggctgggaggaggaggccaggctcgtggtggaggacgtcaaggccgacccggcgtccgcgaccgccggcaccgtgatccgccgtaggctgcagctcatgatgtacaacgacatgttccgcatcatgttcgaccgcaggttcgagtccgtcgacgacccgctcttcaacaagctcaaggccatgaacgccgagcgcagcatcctgtcgcagagcttcgactacaactacggcgacttcatccccattctccgaccgttcctccgcaagtacctcaaccggtgcacaaacctcaagaccaagaggatgaagctcttcgaggaccacttcgtcgctgacagaaagaaggcgctggagcagaatggggagatcaggtgcgccatggaccacatcctggaggcggagaggaagggcgagatcaaccacgacaacgtcctctacatcgtcgagaacatcaacgttgcagccatcgagacaacgctgtggtcgatcgagtggggcatcgcggagctggtgaaccacccggacgtccagtcgaagctccgcgacgagatgaccgccgtgctgggcgccgacgtggcggtgacggagccggacctggagcgcctcccctacctgcagtccgtcgtgaaggagaccctccgcctccgcatggccatcccgctgctcgtgccgcacatgaatctcagcgacgccaagctcgccggctacgacatccccgccgagtccaagatcctcgtcaacgcatggttcctcgccaacgaccccaagcggtgggtgcgcgccgacgagttcaggcccgagcgcttcctcgaggaggagaaggccgtcgaggcccacggcaacgacttccgcttcgtgcccttcggcgtcggccgccggagctgccccgggatcgtcctcgcgctgcccatcatcggcatcacgctcggacgcctcgtgcagaacttccagctgctgccgccgcccgggcaggacaagatcgataccaccgagaagcccggacagttcagcaaccagatcctcaagcacgccaccgtcgtctgcaagccgctcgaggcctagaattttctatttgatcgtatggaggcttctgacatgcgtgtctgtgcatgcatgcgtgaacgctggtgccgggagatcgatctatgcacgcatgtgatgtgtattttcctttttttgtgcttttattttacttagttgcatttttgttggtcttcatgtgaggcgtcatgttgtagatttactatgttggtgataatgatgtaaaacttcttcaaaaaaaaaa

SEQ ID NO: 145 - DNA, 1358 bp, Lolium perenne
cctcaccagcacctctctcgcccacgcctccgatctcctctcgccgccgcgctcggtgccaagagaatgggcagcgtcgacgcctccgagaagacgatcaccggctgggccgccagggacgccaccggccacctctccccgtacacgtacaacctcaggaggacgggcgctgaagatgtggtgctgaaggttctgtactgcggcatctgccacactgacctccaccagaccaagaaccaccttggtgcttcaaaataccccatggttcccgggcatgaggtggtaggcgaggtggtggaggtcgggccggaggtgagcaagtacagcgtcggcgatgtggtcggcgtgggggtgatcgttgggtgctgccgcgactgccggccgtgcaaggccaacgttgagcagtactgcaacaagaagatctggtcgtacaacgacgtctacaccgacggaaagcccacgcagggcggcttcgcctcctccatggtcgtcgaccagaagttcgtggtgaagatcccagcggggctagcgccggagcaggcggcgccgctgctgtgcgctggcgtcacggtgtacagcccgctgaagcacttcgggctgatgaccccgggcctccgcggcggcatcctcggcctgggcggcgtgggccacatgggcgtgaaggtggccaagtccatgggccaccacgtcaccgtgatcagctcctccgacaagaagcgcgccgaggccatggacgacctgggcgccgacgcctacctcgtcagctccgacgaggcccagatggccgccgccatggactcgctggactacatcatcgacaccgtgcccgtcaagcacccgctcgagccctacctcgcgctgctcaagatggacggcaagctcgtcctcatgggcgtcattggcgagccgctcagcttcgtgtcccccatggtcatgctcgggaggaagaccatcacgggcagcttcatcgggagcatcgaggagaccgaggaggtgctcaggttctgcgtcgacaagggcctcacctcgcagatcgaggtcgtcaagatggactacctcaaccaggcgcttgagaggctcgagcgcaacgacgtcaggtaccgcttcgtcgtcgacgtcgcagggagcaacatcgacgacactgccgcatgatcaacttggcaacgacgagcgaacctacattgagcgcgacaatttccgtgacatatactcctcaacttggttcaatacatgattgtgaactgtgtgaatgtgtttccgtcttctatcagagattcagagtgtgcatgttagtttcaataggaagaaatgtttggtatgagtccggcctaataataacggatttgctaaaaaaaaaa

SEQ ID NO: 146 - DNA, 1051 bp, Lolium perenne
caatcatccagcccagatctcacgcgtttccttcctccagctaaagaccggcaatggcgaccacggcggctgatgccacggccacggttgccaaggagcagaccaccaccaacggcgccgccagcggtgccgagcaggtcacccgccactccgaggtcgggcacaagagcctgctccagagcgacgcgctctaccagtacatcctggagaccaccgtgtacccgcgcgagcacgagtgcatgaagcagctccgcgaggacaccgccaaccacccatggaacctgatgaccacgtcggcggacgagggccagttcctcaacctgctcatcaagctcatcggcgccaagaagaccatggagatcggcgtctacaccggctactccctcctcgccaccgcgctcgccatccccgaggacggcacgatcttggccatggacatcaaccgcgagaactacgagaccatcggcaagccgtgcatcgagaaggccggcgtcgcgcacaagatcgacttccgcgaggggcccgcgctcccggtgctcgacgagctgctcgaggacgaggccaaccacggcaccttcgacttcgtcttcgtcgacgccgacaaggacaactacctcaactaccaccagcgcctcatgaagctcgtcagggtcggcggcctcctcggctacgacaacacgctctggaacggatccgtcgtgctccccgccgacgcgcccatgcgcaagtacatccgctactaccgcgacttcgtcctcgagcttaacaaggccctcgccgcagacgaccgcgtcgagatctgccagctccccgtcggcgacggcatcaccctctgccgccgcgccaagtgattgtctgattgatgacgcgagcgcgccgccccctcggctccgctccgctccatggatgcggacaagaattgattaattattattccccattttgccgttctggctttcttctgtatcttcttggaaacaaatattgtccctttatgtacgtatatcaaatttatatccagacaaataatattactcctataaaaaaaaaa

SEQ ID NO: 147 - DNA, 1332 bp, Lolium perenne
gacgaatcctaccaaaccgagctaccagatccttctctactaatcgagctccctccgcctgtcctcgtccccgcctcaccgccggccggttctccgctccgagctatacgtccgtccgagaacacccgtcccatattaactatcaacatgacagtcgtcgaggtcttagctgccggcgacgccgccgccgccgcggtggcgcggcccgccgggaacgggcagaccgtgtgtgtgaccggcgccgccgggtacatcgcgtcctggctcgtcaagctgctgctggagaaggggtacactgtcaagggcaccgtcaggaacccagacgacccgaagaacgcgcacctgagggcgctcgacggcgccgccgaccggctggtcctctgcaaggccgacctcctcgactacgacgccatccgccgcgccatcgacggctgccacggcgtcttccacaccgcatccccagtcactgacgaccccgagcaaatggtggagccggcggtgaggggcacgcagtacgtcatagacgcggcggcggaggccggcacggtgcggcggatggtgctcacctcctccatcggcgccgtcaccatggaccccaaccgcgggccggacgtggtcgtcgacgagtcgtgctggagcgacctcgacttctgcaagaaaaccaggaactggtactgctacgggaaggcggttgcggagcaggcggcatcggagttggcgcggcagcgcggcgtggaccttgtggtggtgaacccggtgctggtgatcggccccctgctgcagccgacggtgaacgcaagcatcggccacatcctcaagtacctggacgggtcggccagcaagttcgccaacgccgtgcaggcgtacgtggacgtccgcgacgtggccgacgcccacctccgcgtcttcgagtgcgccgccgcgtccggccgccacctctgcgccgagcgcgtcctccaccgcgaggacgtcgtgcgcatcctcgccaagctcttccccgagtaccccgtccccacaaggtgctccgacgaggcgaacccgaggaagcagccatacaagatgtctaaccagaagctccaggacctcggactcgagttcaggccggtgagccagtccctgtacgagacggtgaagagcctccaggagaagggccaccttccggtgctcagcgagcaggcagaggcggacaaggaaaccctggctgcagagctgcaggcaggggttaccatccgagcatgaggaacaagaaatcaaccatgtccatactgctactgtcatgtaaaccaggcagtgtctgttgaatgcctaatctaagttcttgtaaaaaaaaaa

SEQ ID NO: 148 - DNA, 1236 bp, Festuca arundinacea
caagagctagttcttctgtccatccgtagctcttccctttcaccaacaagctagtttagacaagtacagtggtactgtaagagcaacaatgaccgttgtcgacgccgccgcgccgcagctgcctggccatgggcagaccgtgtgcgtcaccggcgccgcggggtacatcgcgtcggggctcgtcaagctgctcctggagagaggctacaccgtgaagggcacagtgaggaacccagatgatcccaagaacgcccacctgaaggcgctggacggcgccaccgagaggctgatcctctgcaaagccgacctcctcgactacgacgccatatgcgccgccgtcgagggctgccacggcgtgttccacaccgcctctccagtcaccgatgatcctgagcagatggtggagccggcggtgcggggcacggagtacgtgatcaacgcggcagcggatgcgggaacggtgcgccgggtggtgttcacgtcgtcaatcggtgccatcaccatggaccccaaccgcggtcctgacgtagtcgtcaatgagtcctgctggagcgacctcgaattctgcaagaaaaccaagaactggtactgctacggcaaggccgtggcggagcaggctgcgtgggaggcggccaggaagcgcggcatcgacctcgtcgtcgtgaaccctgtgctcgtggtagggccgctgctgcaaccaacggtgaacgctagcgccgcacacatcctcaagtacctcgacggctcggccaagaagtacgccaacgctgtgcagtcatacgtagacgtgcgtgacgtagccggcgcgcacatccgggtgttcgaggcgcctgaggcgtcgggccggtacctctgcgccgagcgcgtgctgcaccgtggggacgttgtccaaatcctcagcaaactcttccctgagtaccctgtgccaacaaggtgctctgatgaagtgaacccacggaagcagccttataagatgtccaaccagaagctgcaggatcttggcctccagttcactcctgtgaacgactctctgtatgagaccgtgaagagcctccaggagaagggacatctcctagtaccaagcaaaccagagggattaaacggtgtaacggcatgatactgctaaagaagcagcagagttcacgtgctcctgtaacatggtcaaacatgagttgtttttctgtataaattctatccagtatcgtgttatttaagtgaactaagagaaaaaaaaaa

SEQ ID NO: 149 - DNA, 1428 bp, Festuca arundinacea
ctctcgatcggcagacgcagagatcgatgggttccaccgccgccgacatggccgcgtccgccgacgaggaggcgtgcatgttcgccctccagctcgcctcctcgtcgatcctcccgatgacgctgaagaacgccatcgagcttggcctcctggagatcctggtggccgccggcggcaagtcgctgacccccaccgaggtggccgccaagctcccgtccgcggcgaacccggaagcgccggacatggtggaccgcatgctccggctgctcgcgtcgtacaacgtcgtgacgtgcctggtagaggagggcaaggacgggcgcctctcccggagctacggcgccgcgcccgtgtgcaagttcctcacccccaacgaggacggcgtctccatggcggcgctcgcgctcatgaaccaggacaaggtcctcatggagagctggtactacctcaaggacgcggtccttgacggcggcatccccttcaacaaggcgtacggcatgtcggcgttcgagtaccacggcacggacccgcgcttcaaccgcgttttcaacgaagggatgaagaaccactccatcatcatcaccaagaagctcctcgagctctaccacggcttccagggcctcggcaccctcgtcgacgtcggcggcggcgtcggcgccaccgtggccgccatcgccgcccactaccccgccatcaagggggtcaacttcgacctcccccacgtcatctccgaggcgccgcagttcccgggcgtcacccacgtcggcggcgacatgttcaaggaggtgccctcgggcgacgccatcctcatgaagtggatcctccacgactggagcgaccagcactgcgccacgctgctcaagaactgctacgacgcgctgccggcgcacggcaaggtcgtgctcgtcgagtgcatcctgccggtcaacccggaggccaagcccagctcgcagggggtcttccacgtcgacatgatcatgctcgcgcacaaccccggcggcagggagaggtacgagagggagttcgaggccctggccaggggagctgggttcaccggcgtcaagtccacgtacatctacgcaaacgcgtgggccatcgagttcaccaagtagatgagatccctccggcctccatgcatccaggcaacctcccaccgatatgagaacgatcgtcgtcgatcttgctggctgctgcctctgctcctgcatcgatctgcatacgtaccctttgcttggtttttcctctgttttccctaattttctcatgctctgaattctgaattctgatggctgtgtcgtcgatctgctcggaaatgttctgaaaaggttgcgtatgttgtatacttgtatgtgatgtaatgagatgatttctctcctttgttgaatactcgagtaaattgaagtgactctcatcttcctctgaaaaaaaaaa

SEQ ID NO: 150 - DNA, 1455 bp, Lolium perenne
ctctcgctcacaccaaaatcgcccaccagcaccagcatctctcgatcggcagacgcatagatcgatgggctccaccgccgccgacatggccgcgtccgccgacgaggacgcgtgcatgttcgccctccagctcgcttcctcgtcggtcctcccgatgacgctgaagaacgccatcgagcttggcctcctggagatcctggtggccgccggcggcaagtcgctgaccccgaccgaggtggccgccaagctcccgtccgcggcgaacccggaagcgccggacatggtggaccgcatactccggctgctcgcgtcgtacaacgtcgtgacgtgcctggtggaggagggcaaggacggccgcctctcccggagctacggcgccgcgcccgtgtgcaagttcctcacccccaacgaggacggcgtctccatggcggcgctcgcgctcatgaaccaggacaaggtcctcatggagagctggtactacctcaaggacgcggtccttgacggcggcatcccgttcaacaaggcctacggcatgtcggcgttcgagtaccacggcacggacccgcgcttcaaccgcgtcttcaacgaagggatgaagaaccactccatcatcatcaccaagaagctcctcgagctctaccacggcttcgagggtctcggcagcctcgtcgacgtcggcggcggcgtcggcgccaccgtggccgccatagccgcccactaccccaccatcaagggggtcaacttcgacctcccccacgtcatctccgaggcgccgcagttcccgggcgtcacccacgtcggtggcgacatgttcaaggaggtgccctcgggagacgccatcctcatgaagtggatcctccacgactggagcgaccagcactgcgccacgctgctcaagaactgctacgacgcgctgccggcgcacggcaaggtcgtgctcgtcgagtgcatcctgccggtcaacccggaggccaatcccagctcgcagggggtcttccacgtcgacatgatcatgctcgcgcacaaccccggcggcagggagaggtacgagagggagttccaggctctcgccaggggagccggattcaccggcgtcaagtccacgtacatctacgccaacgcgtgggccatcgagttcaccaagtagatgagatccctccaagcatccaggcaacatgtcccaccgatatgagaacgatcgtcgtcgatcttgctggctgctgccgctgctcctgcatcgatcaccctttgcttggtttttcctctgttttccctaattttctcatgctctaaatccattctgaattttaatggttgtgtcgccgatctgctcggaatgtaccattaataacgatgttctgaaaaggttgcgtatgttgtatacttgtatgtgatgtaatgagatgatttctctcctttgttgaatatacgagtaaattgaagtgaaaaaaaaaa

SEQ ID NO: 151 - DNA, 2101 bp, Lolium perenne
catcaacctaaaacccacgcgatccaacaccccctagagaaaaacaaaaacaaaaagattacagtttctggtttgagtatcaatcgatggtgggcttcgctaagatcgccatggagtggatccaagatccactgagctggctgttcatcgcctccgtggttttcgtggttctgcagcggcggcggcggggcaacgtggcgccgtttcccccgggcccgaaaccgctgccgatcgtcggcaacatgtcgatgatggaccagctcacccaccgtggcctggcggcgctagcgaaggagtacggcggccttctccacatccggctcggtaagctccacacctttgccgtgtcgacgccagagtatgcccgggaggtgctgcaggtgcaggacggtgccttctcgaaccgtcccgcgaccatcgccatcgcgtacctcacctacgaccgagccgacatggcgttcgcgcactacgggcccttctggcgccagatgcgcaagctgtgcgtgatgaagctcttcagccggcgccgcccggagacgtggctcgccgtgcgcgacgagtccgcggctctcgtccgcgccgtggccaggcggaccggcgagtccgtggacctcggcgagctcatttttaaactcaccaagaatgtcatcttccgcgccgcgttcggagctggtgcggtcgccgccgacgccgaggagggcgacggagcagggaagcaggacgagttcatcgccatcctccaggagttctccaagctcttcggcgccttcaacatcggagacttcatcccgtggctgagctgggcggacccgcagggcatcaacgtgcgcctccgcgccgcgcgcaacgccctcgacgagttcatcgacaagatcatcgacgagcacatggagaggggcaagaatcccgatgatgccgatgccgacatggtggacgacatgctcgcgttcctcccggaggcgaagccgaagaagggcgccgccggcgacggcgtggacgacctgcagaacacgctccgcctcacccgcgacaacatcaaggccattatcatggacgtgatgtttggcgggacggagacggtggcgtcggcgatcgagtgggcgatggcggagatgatgcacagccccgacgacctccgccgcctgcagcaggagctcgtcgacgtggtggggctcgaccggaacgtggacgagtcggacctcgacaagctccccttcctcaagtgcgtcatcaaggagacgctccggctgcacccgcccatcccgctgctcctccacgagaccgccgaggactgcgtcgtcggcggctactccgtgccccggggctcccgcgtcatgatcaacgtctacgccatcggccgcgaccgcagggcgtggaaggacgccgacgtgttccggccgtcgcggttcgtgcagggggaaggggaggccgccgggctcgacttcaaggggggatgcttcgagttcctgcccttcgggtcaggccgccgctcctgccctggcatggcgctcggcctgtacgcgctggagctcgccgtggcgcagctcgcgcacggtttcagctgggagctgcccgacgggatgaagccgtcggagctggacatgagcgacgtcttcggcctcaccgccccgcgcgccaccaggctcttcgccgtgcccacgccccgcctcgcatgcacccagctgctgggagctgacgacgccgggcgccaggcgtgacggccattgctgtgttagcaagcgatcgatggtatatgtaccagctggccggaagatgaaggtgtttgatatattcagaggtgatggcggaggcgccattggtggagcttggtggttttatcttgctttttttttactatttttcttatactttgaactcaattaagtctggtgacaacagaacacaataagcggattatcatgcttgctggatgcatgcttggatacagtgttaagcatgatgtgttctaccatgaagaacgcaaattgtaaaaacaagtttttagacctgctgcaccgagattctgtattttcttcctcttggttttccatcgtgagtactatattaatgccaggatgatagttccagttgaaaaaaaaaa

SEQ ID NO: 152 - DNA, 2460 bp, Lolium perenne
gttctttgcaacgatcaacactgtcagaatccagatacacacacacacacacacacaccaagcagcgtctagctagcttacttgctctagtagttctttgcaaatatccatggagtccgagaacgttgccgccaacggcgatggcctgtgcgtggcacagccggctcgcgccgaccctctgaactggggaaaagcagccgaggagctgtctgggagccatcttgatgccgtgaagcgaatggtggaggagtaccgccgccctgtggtgaccatggaaggcgccagcctgactatcgccatggtcgctgcggtggctgccggcgccgacaccagggtggagctcgacgagtccgcccgcggacgcgtcaaggagagcagcgactgggtcatgaacagcatggccaacggcaccgacagctacggtgtcaccaccggcttcggtgccacctcccaccggaggaccaaggagggtggcgctctccagagagagctcatcaggtttctcaatgcgggagcattcggcaccggcagcgatggccacgtcctgcccgctgcgacgacgagggctgccatgcttgtccgtgtcaacaccctgctccagggctactctggtatccgctttgagatcctcgagacggtcgccacgcttctcaacgccaacgtgacaccgtgcctaccgctccggggcacgatcacggcatccggtgacctcgttccgctgtcctacatcgcgggccttgtgaccggccgcccaaattctgtggcgactgctccggatggcacgaaggttaacgctgcagaggcattcaaaatcgcgggcatccagcacggtttctttgagctgcagcctaaggaaggccttgccatggtcaacggcaccgcggtgggctccggactggcgtccatggtgctcttcgaggctaacatccttggcatcctcgctgaggttctgtcggctgtgttctgtgaggtcatgaacggcaagccagagtacaccgaccacctcacgcacaagttgaagcaccaccctggtcagattgaggccgcggctatcatggagcacatccttgaaggaagctcctacatgatgctcgcgaagaagctcggcgagctcgacccactgatgaagccgaagcaagataggtatgcccttcgaacatcaccgcaatggctgggccctcagattgaggttatccgtgccgccaccaagtccatcgagcgcgagatcaactccgtcaacgacaacccgctcatcgacgtctctcgaggcaaggccatccatggtggcaacttccagggcacacccatcggtgtgtccatggataacaccaggcttgccattgctgcgatcggcaagctcatgtttgcccagttctctgagctagtgaacgacttctacaacaatggtttgccttccaatctctcgggtgggcgcaacccgagcttggactatggcttcaagggtgctgagattgccatggcctcctattgctccgagctccaattcttgggcaaccctgtgactaaccatgtgcagagtgcggagcagcacaaccaagacgtcaactctcttggtctcatctctgctaggaagacctctgaggccatcgatattctgaagctcatgtcatcgacattcttggttgcactgtgccaagctatcgacctccgccacctcgaggagaatgtcaagaatgccgtcaagaactgtgtgaagatggtggctaggaagaccctgagcaccaatgacagtggccatctccacagcgcacgcttctgcgagaaggacctgctcttgacgatcgaccgcgaggcggtgttcgcctacgcagacgacccttgcagcgctaactacccactgatgcagaagatgcgtgcagttctcgtggagcacgccttggccaacggtgaggctgagcgggatgtgcagacgtcagtgttcgccaagcttgccgcattcgagcaggagctccgtgcagtgcttccaagggaggtcgagtcagcccggtgtgctgtggagaatggcaccgccgcgcagcaaaaccgcatcaccgaatgccggtcgtacccgctgtaccgcttcgtgcgcaaggagctcggaaccgagtacttgaccggagagaagacgaggtctcctggtgaagaggtggacaaggtgtttgtggctatgaaccaggggaaacacatcgacgcactgcttgagtgcctcaaggagtggaacggtgagcccctgcctatctgctgaagaatgaatcaaggaactgaagaatagagtacttgagagttcagaaggctccacatgtgcttagttaatagtaagtatagtactgttttttcattgtatcttgtgcattatatatacatgtaacactggaataaaatttcaaaaaatcagatcactcaatgggcagcatgtaacactggaataaaaatttcaaaaaaatcagatcaaaaaaaaaa

SEQ ID NO: 153 - DNA, 2595 bp, Festuca arundinacea
ctcctctgtaattcgagctcctcttcagcacaagtacttccaccagagtgccagacaacaatccagcaccacttccagaatacatacacacacgtacccgtgtctaaaccttacttgctttcctagttctttgcatatctccatggagtgcgagaacgggcacgttgccgccaacggcgatggcctctgcgtggcgcagccagcccgggccgaccctctcaactgggggaaggcagcagaggagctgtccgggagccatttggatgccgtgaagcggatggtcgaagagtaccgcagaccagtcgtgaccatggagggcgccagcttgaccattgctatggtcgccgcggtggccgccggcgccgacacccgggtggagctcgacgagtccgcccgcggacgcgtcaaggagagcagcgactgggtcatgaacagcatggcgaacggtaccgacagctatggtgtcaccaccggcttcggcgccacctcacaccggaggaccaaggagggtggcgctctgcagagagagctcatcaggttccttaacgcgggagcatttggcaccggcagcgatggccatgttttgcccgctgcaacaaccagggcggccatgctcgtccgtgtcaacactctgctccaggggtactctggcatccgcttcgaaattctcgagacgatcgccacgcttctcaatgccaacgtgacgccgtgcctaccgctccggggcacaatcacggcatccggcgacctcgtcccattatcctacatcgccggccttgtgactggccgcccaaactctgtggcgacagctccagatggcagcaaggttaacgcagcagaggctttcaagattgccggcatccagcatggcttctttgagctgcagcccaaggaaggccttgccatggtcaacggcactgccgtgggctccgggctcgcgtccatagtgcttttcgaagctaacatccttggcatccttgccgaggttctatcggccgtgttctgcgaggtgatgaatggcaagccggagtacaccgaccacctaacacacaagctgaagcaccacccgggccagatcgaggccgcggccatcatggagcacatccttgaaggcagctcctacatgatgctcgcgaagaagctcggtgagctcgacccactgatgaagccaaaacaagataggtatgcactccgcacatcaccacaatggctcggccctcagatcgaggtcatccgtgctgctaccaagtccatcgagcgtgagatcaactccgtcaacgacaacccactcatcgacgtctcccgcggcaaggctatccacggtggcaacttccagggcacgcccatcggtgtgtccatggacaacaccaggcttgccattgcggccatcggcaagctcatgtttgcccagttctcggagcttgtgaacgatttctacaacaacggtttgccttccaatctctctggtgggcgcaatccgagcttggactatggcttcaagggtgctgagattgctatggcctcatactgctccgagctccagttcttgggcaaccctgtgactaaccatgtgcagagcgccgagcagcacaatcaagacgtcaactctctcggcctcatctcttccaggaagaccgctgaggcgattgacattttgaagctcatgtcctcgacattcatggttgccttgtgccaagctatcgacctccgccacatcgaggagaatgtcaagaatgccgtcaagaactgtgtgaagacggtggctaggaagaccctgagcaccaatgacagtgggcatctccacaatgcacgcttctgcgagaaggacctgctcctgacgatcgaccgtgaggcggtgttcgcctacgcagatgacccttgcagcgccaactacccgctgatgcagaagatgcgtgcggttctcgtggagcatgccttggccaacggtgaagccgagcaggacgtgcagacgtcagtgttcgccaagcttgccacattcgagcaagagctccgtgcggttcttcccaaggaggtcgagtctgcccggtgttccgtggagaacggcaccgccgcacagcagaaccgcatcagcgaatgccggtcatacccgctctatcgcttcgtgcgcaaggagctcgggactgagtatttgaccggagagaagacgaggtctcctggtgaagaggtggacaaggtgtttgttgctatgaaccagggtaagcacattgacgcgctgcttgagtgcctcaaggagtggaacggtgagcccctgcctatctgctgaagaatggctcaaggaactcaagaatagagtgcttgagaattcagatggtactgttttataattatatctccggatatcgatgtttgcaatgttcctccagagctgcaatgccagttagaaaagataatagcatgacttggtagtgttgtttagcctagaaattttctatgatgttagttagtaaaagggtacactttgtgataaatatacataattattgcactagtcctttatttttatatcaatgttctgtctactgaggcaactttgaaggattcaaagaatctagtattggcctgccaaaaaaaaaa

SEQ ID NO: 154 - DNA, 1382 bp, Lolium perenne
ggccacaactcgccacatctggcatagcgagcactgacagtgagctacatccatcaccatggcttctagccgtgtcctgctcctcgtcgtggcagctctggcgatctccgtgtccgccacggccgcggccaccaagatcagtgctccactaccgccgctggccaagggcctgaacttcgatttctacaaggccacctgcccgcaggccgagtccatcgtcttcaacttcctccgcgacgccatccgcaaggacgtcggcctcgccgccgcgctcctccgcatccacttccacgactgcttcgtgcagggctgcgacggctccgtgctcctcgacaagaccggcggcaccgacagcgagaagatcgcaccacccaacgtcacgctccgccccaccgccttcaaggccatcaacgacctccgcgctctcctcgccaaggcctgcggcgccgtcgtctcctgcgccgacatcgccgccctggccgcgcgcgactccgtgcacctcgccggcgggccgcactaccccgtcccgctcggccgccgcgacgggctcgcccccgcgaacctcaccaccatcctcaacgccctcccggcaccgagctccaacgtcaccaccctcctcagattcctcgccaagatcagcctcgacgccaacgacctcgtcgcgctatccggcgcgcacacgctcggcatcgcgcactgcacctccttccaggagcgcctcttcccgcagaacgacgtcaccctcaacaagtggttcgcgtcgcagctcaggctcacctgcccggcgctcaacaccgacaacaccaccaacaacgacatccgcacccccaacgtcttcgacaacaagtactacgtcgacctgctcaaccgccagggactcttcacctccgaccaggacctgcacaccgacgccaggaccaagcccaccgtcaccaggttcgccgtcgaccaggccgcctttttcgaccagttcgtcttctccgtcgtcaagatgggccagatcaacgtgctcaccggcagccagggacagatacgcaacgactgctccgcgcccaacaaaggccgcaccaacgacgacctgccgtggtccgtgctcgagaccgtcaccgaggccgcccagagcttggtgttgtagatatgcgctgtggataggttggttcagtcgatccatctctagcctacgtactttcttcccaaagttgtagctttattagcgagccgtgtggtaatggtttgggctttgagagccacagttgatgcatgtgtgtttagtttcttgagcaactcgaccagtttaataatcacgagatggtttttggtgtgtcgaatgacgactagaaaattgagatgaatatttgatgttattttcaataaaaaaaaaa

SEQ ID NO: 155 - DNA, 1260 bp, Lolium perenne
atcgcctttctcctccatgaccaccatgggcggctcgtcgatcctgcccgcgccgaccgtggcgacgacggcgctggttctgctgatcgtgctgttcgcatcgccggcaacggtggcgaaaggttctgggctgtccgtcgggttctacaagaagttgtgtccgaaggcggagaaggtcgtccggcgaactgtcaccaaggcctttgagaaggagcctggcaccccggccgacatcatccgcctcttctttcacgactgctttgtccgagggtgcgacgcatcggtgctgctggaatccacgccagggcgcatggcggagagggactcgaaggcaaacaaccccagcttggatgggtttgaggtcattagcgacgccaaggagacccttgagaagctctgcccgcaaaccgtctcctgtgctgacattctcgccctcgccgcccgcgatggcgcctacctcgctagcgggctcgactatgcggtgcccaccggccgccgtgatggcctcgtctccaaggaagacgaggttctccctagtgtccctcaccccgacttcaaccattctcagctcgtggaaaacttcacggcaaaaggctttacggcggaggagatggtgacgctgtcgggggcgcacaccatcggcacctcgcactgctcgtccttcacggaccgcctctacaacttctcccagggcggcgcgctgaccacggaccctgcgctgccggcggcatacgccgcgctgctgaaggagaagtgcccgccggagacagcggcgcagaacgacaccaccatggtgcagctcgacgacgtgacgccgttcgtgatggacaaccagtactacaagaacctgcttgccggcaccgtgccgctcggctccgacgtagcgctcatggagagccccgacacggcggcgctcgtcgagctctacgcccgcgagcccgccgagtactgggccaagcgcttcgttgcggcgatggtcaaggtgagcgagatggaggtgctcaccggggccgagggggagatccggctcaactgctccaaggtgaactagtatataaccggttgctgcgtttgtctctgtactatatgtttgggaaagatgacgatacacgttcttcttttgtgttaatgttttttctttcatttgttttcatatggtggtgagaaatatatacacatttgtttgcgtcataaactgtatagcttacacagcatgcataaaagcatctatatcattccatttgagttgtaaaaaaaaaa

SEQ ID NO: 156 - DNA, 1204 bp, Lolium perenne
atccccaaacccaaaaggtgaggcctccagatacttggatctccaatggctcctgctactcccaaggacagctctgctctgcctggtttgctcttgctcttcgcagcagcgacgtccgtggcggtagcgaacgcacagctatcagagaactactacgggtcttcttgtcccaccgcgcttctcaccatcaggactgtcgtgacgacggcggtgctgctggaccaccgcatgggcgcttctcttctccggctccacttccacgactgctttgtgcaagggtgcgacgcgtccgttctgctggatgacacggccggcttcaccggcgagaagggggccgggccgaacgccgggtcgctgcgcggtctggaggtgatcgacaagatcaagatgctgctggagttcatgtgcccgcggaccgtctcctgcgccgacatcctcgccgtcgccgcccgcgactccgtcgtccgtctaggggggccatcatgggcggttcaacttggaaggagggacgccaccacagcaagcgcgtcacttgctagtagtgacctcccaggccccaactccaacctcaatgatctcctcaccgctttctccaaaaaaggactaagcaccacggacatggttgctctatcaggggcccataccatcggccgggcgcagtgccagaactaccggaaccggatctacaccgacaccgacattgacggggcattcgcagcgtccctgcgaggcggctgcccacaggccggcggcgacggcaacctcgcgccgctcgacgcgtcctctcccaacaccttcgataacggctacttctccggcctcctctcccgccaggggctgctccattccgaccaggcgctgtacgacggcggctccacggacgatctggtcaggacctacgcctccaataacgatcagtttggcagcgacttcgctgcggcgatggtgaaactgagcaatatcggcctgctgacggggtcgtccggggagatcagggtcaactgccgggcggtgaattaacgatggatggatgggggcatcatgaaacgaacaaggcgtgcgatttccggaactgcaggcaacgaaactgcatatttatgtacactgcctatttatttcctgtccttgtgtccccgtcttgttatattacatccataatccatgttaagatggtggcattggtttaaaaaaaaaaaaaaaaaaa

SEQ ID NO: 157 - DNA, 1530 bp, Lolium perenne
actcattcatctgtcgtctcctgcttccctcaagcttagatcgattgcagccggccggggactgttgagctaccactgccggtcgctggtacgagcggacgtaaggagagatccagatggccgcgacgatgaccgtggaggaggtgaggaaggcacagcgggcggaggggccggcgacggtgctggccatcggcacggcgacgcccgctaactgtgtctaccaggctgactacccggactactacttcaagatcaccaagagcgaccacctcgccgatctcaaggagaagttcaagaggatgtgcgacaagtctcagatcaggaagaggtacatgcacctgacggaggagatcctggaggagaaccccaacatgtgcgcgtacatggcgccgtcgctggacgcgcgccaggacatagttgtcgtcgaggtcccgaagctcgggaaggcggcggcacagaaggcgatcaaggagtggggccagccgcggtccaagatcacccacctcgtcttctgcactacctctggtgtggacatgccaggcgccgactaccagctcaccaagatgctcggcctgcgcccgtcggtgaagcgcctcatgatgtaccagcagggctgcttcgccggcggcacggtgctccgcctcgccaaggacctggctgaaaacaaccgcggcgcgcgcgtgctggtggtctgctcggagatcacggccgtgaccttccgcggcccgcacgagtcacacctcgactcgctggtcggccaggcgctcttcggggacggcgctgccgcggtgataatcggcgccgaccccgacgtgtccgtcgagcgcccgctgttccagctggtgtcggcgagccagaccatcctgccggactcggagggcgccatcgacggccacctcagggaggtcggcctcaccttccacctcctcaaggacgtgcccgggctcatctccaagaacatcgagcgcgccctggaggaagccttcaagccgctcggcatcgacgactggaactccgtcttttgggtggcgcacccgggcgggccggcgatcctcgacatggtggaggcaaaggtaaacctcaacaaggagcggatgcgtgccaccaggcacgtcctctccgagtacggcaacatgtccagcgcatgcgtcctcttcatcatggacgagatgcgcaagcgctctgccgaggatggtcacaccaccaccggcgagggaatggattggggcgtcctctttggcttcgggcccggcctcaccgtcgagaccgttgtcctccacagcatgcccattgccgctgatgccaccgcttgatcgatggttccatctccgtttatctgccacatcgatggatacctactactactaccgccgccgccgctgctatccaaagtaatttgtattgtattcatgcatacctggtttgtatttgttggtaggattcgttccgctattatgtcgcttgtgtcgcgtacactgttgtatcctagtaatagtaatcaaacggagtacggtttatgtaaaaaaaaaa

SEQ ID NO: 158 - DNA, 1418 bp, Festuca arundinacea
gaaaagacagcacagaaatctatattctacaaggcagaaaagagcagcaggggaaatctagctaaggtcttgagaggaagatgaagcaggaggtgaagagcgagatgaacggcgagacgatgagcggcaacaaagggccggtggtggtgaccggggcgtcgggtttcgtcgggtcatggctcgtcatgaagctccttcaggcggggtacaccgtccgggccaccgtgcgcgaccctgggaacgtcgagaagacgaagccattgctggagcttcccggagccaaggagcggctgtccatctggcgtgccgacctgagcgaggaaggcagcttcgacgaggccatcgcgggctgcaccggcgtcttccacgtcgccacgcccatggacttcgagtccaaggaccctgagaacgaagtgatcaagccgacggtggaagggatgctgagcatcatgagagcgtgcaaggaggccggcaccgtcaagcgcgtcgtcttcacctcctccgccggcaccgtcaacattgaggagcggccgaggccggcctacgaccaggacaactggagcgacatcgacttctgccgccgcgtcaagatgacaggacagatgtacttcgtgtccaagtccctggcggagaaggccgccatggactacgccaaggagaacggcgtggacttcatcagcatcatccccacgctcgtcgtcggccccttcctcagcgccggcatgccgcccagcctggtcaccgccctggcactcatcacggggaacgaggcccactactcgatcctgaagcaggtgcagctggtccacctggacgacctctgcgactccatgacctacctcttcgagcacccggacgccaacggccgctacatctgctcctcccacgacaccaccattcatggcatcgccaggatgctcaaggagaggttccccgagtacgacatcccacagaaattcccgggagtcgacgacgacctccagccgatccacttcttcttcaagaagctgctcgaccacgggttcaggttcaggtacaccgccgaggacatgttcgacgccgcggtctggacgtgcagggagaagggcctgattccgctcggagcggaaggggcaggcggcccggccagtgcagccggcaagctgggagctgttctcgtgggcgaaggtcaggcgattggtgctgagacataagcgctagtgcatgtacactaggctggctacctcagacacatggtggagcgatgattatgttcgttaattctactatcctatatttcggttcagaaattgcattaagagaaccctgtaattggtgggatattatgaacggattatggaacgcaaataacttcatgacaaaaaaaaaaaaaaaaaaaaaaaaaaaaaaaaaaaaaaaaaaaaaaaaaaaaaaaaaaa

SEQ ID NO: 159 - DNA, 1209 bp, Lolium perenne
gagcaccacacatggcgactgaagccaagggggagacggtgctggtcaccggcgccagcggcttcatcggctcctggctcgtccgcctcctcctcgcccgcggctactccgtccacgccgccgtcctcaaccccgatgacaaggccgagacggaccacctcctcgcgctcgccgctgcggccggcgacgagggccgcatccgcttcttcaggtgcgacctcctcgacggcgccgccatgctcgccgccgtgcggggatgctccggcgtgttccacctcgcctctccctgcaccgtcgacctcgtcctcgacccccagaaggagcttgtggtgccggcggtggagggcacgctcaacgtgctgcgcgccgccaaggaagctgggggagtgcggcgggtggtggtgacctcctccgtctccgccctcgtcccctgcccggggtggccggccggcgaggtcctcgacgagcgctgctggaccgacatcgactactgcgacaagaacggggtttggtaccctgcttcaaaggcactggcggagaaggcggcatggaagtttgcagaggagaatggactggatgtggtgacggtcaatccagggacggttttgggcgagatgattccgccaaggctcaatgccagcatggccatgtttcttcgcttacttgaaggttgcaaagaggagtatgcagatttcttcatcgggccagtgcacgtggaagacgttgcattagcccatattctgctgtacgagaatccgtcagcatccgggaggcacctctgcgtggagcccatctgtcactggagtgttttcgcggcgaaagtcgccgagctctaccctgattacaaagttccaaaattccctgaggacacacagcctgggctggtgagggcggaggcggtgccaaagaagctgatggcgttgggtttgcagttcactcctcttgagaagatcatcagggatgccgtggagagcctcaagagcagaggatgcatcgcctgatgattggatcgttaggcatgtcacccttccgtcgtaggttcatgatcatccttgttgagagatgtgttgtgttgtgtccagcccagtgcctacccagaccatatacttaccagtatgatttgtgcaataacagccggttgatgtacggcatcacctgccctacacttgggatgcggatgctgtcacactgactccctcaaaaaaaaaa

SEQ ID NO: 160 - DNA, 1260 bp, Lolium perenne
gaaaagcttcacacagcttgagaaaatggtgagctcaaccaagggcaaagtgtgtgtaactggggcttcaggctttgttgcctcttggctcatcaagaaactccttgagtctggatatcatgtgatagggactgtcagagacccagggaatcgaagaaaggtgggacacctttggaaactaccaggtgcaaatgagaggctccaacttgtgagagctgatctattggaggaagggagctttgacgatgctgtaagggcttgtgagggtgtcttccacattgcgtcgcctgtccttgggaaatctgattccaattgcaaggaagcaacactcggtcctgcaatcaatggtaccctcaacgtgctaagatcctgcaagaagagtccatttctcaaaagggttgttctcacatcttcatcatccgcggtaaggattagggatgaaactcagcagccagaactgttatgggatgaaacgacatggagctctgtgccactctgtgaaaagctacagctatggtatgccctggcaaaggtatttgcagagaaagcagcattggactttgccaaggagaataacattgaccttgtgacagttcttccatcattcgtaattggacccagtttatcccatgaattgtgcactactgcttcagatatccttggcttacttcaaggtgacacagacaggttcactttgtacggaaggatgggatatgttcacatcgatgatgttgcccggagccacattctagtgtacgaaacaccggaggcaactggcagatatctgtgcagctcagtggttctggataacaatgaattggttggcttactggcaaaacagtttccagtattccccattccaaggaggctcaagaacccctatggaaagcaggcataccagctagacacatccaagctccaggggctgggtctcaagttcaaaggagtgcaggagatgtttaacgactgcgtcgaatcgctgaaagatcagggccatttgctggagtgcccgttgtgataacagagacagcattgacaagccatagccaaacagcattgacaagccatagccaaacacatctcaactatgcctgaatcatgtcagttctcgagtcatagattttttttttctcttcaaataattcccatgtactctccttactataccgaacatcaattgtcagcggcagattaaatgtgtccatatgctttgcaattgtttcaattagtaatgaaatatttgaaacaaaaaaaaaaaaa

SEQ ID NO: 161 - DNA, 1438 bp, Lolium perenne
aaacgactccaacgcaccgatcgacgacacaccctgcacttcacgggtcgatcggatcggaggatggcgccggtggtggagagagcgcccttcctgccgacgggggaggccacgctgcggccgtccttcgtgcgggacgaggacgagcggcccaaggtggcgcacgaccgcttcagcgacgaggtgcccgtcatctcgctccacggcatcgacgacgcgcggaggaccgagatccgggaccgcgtggcggcggcgtgcgaggggtggggcatcttccaggtcgtcgaccacggcgtcgacgccgcgctcatcgccgagatggccaggctctcgcgcgacttcttcgcgctccccgccgaggacaagctccgctacgacatgtccggcggcaagaagggcggattcatcgtctccagccacctccagggcgagacggtccaggactggcgggagatcgtgacctacttctcgtacccggtcaaggcgcgggactacggccggtggccggacaagcccgcggggtggcgcgcggtggtggagcagtacagcgagcggctcatggcgctgtcctgcaagctgctgggggtgctgtcggaggccatgggcctggagacggaggccctgtccaaggcgtgcgtggacatggaccagaaggtggtggtcaacttctaccccaagtgcccccagcccgacctcaccctcggcctcaagcgccacaccgaccccggcaccatcaccctcctcctccaggacctcgtcggcggactccaggccacccgcgacggcggcaacacctggatcaccgtacagcccatcgccggcgcattcgtcgtcaacctcggcgaccacggccactacttgagcaacgggaggtttaagaacgcggaccaccaggcggtggtgaacggggagagcagcaggctgtccatcgccacgttccagaacccggcgcccgacgccaaggtgtggccgctggcggtgagggagggggaggacaccatcctggaggagcccatcaccttcaccgagatgtaccgccgcaagatggcgcgcgacctcgagctcgccaagcgcaagaagcaggccaaggccgatcagctcaagcagcagctgcagcaggaggccgcgcccgccgccgcgcccaccaagccactcaaccagattcttgcctagattccatgccgattcattcatgcgtgatatatagtactatgtactatatcgtattaaaataagtaattatctctatctactcatttgtgtgtaattaagagatgagtaattatctagtatatacacatttgtctgcgaggagcgagctggacctgtaataacatgtagcatgtcctacgtggaaccgatcagctgattggagctgtcacatgagtttgctgtgtgcagaaattgaacgcattcggtactgctttcaaaaaaaaaa

SEQ ID NO: 162 - DNA, 1214 bp, Lolium perenne
gaaaatccccaaacccaaaaggtgaggcctccagatacttggatctccaatggctcctgctactcccaaggacagctctagctctgctctgcctggtttgctcttgctcctcgcagcagcgacgtccgtggcggtagcgaacgcacagctatcagagaactactacgggtcttcttgtcccaccgcgcttctcaccatcaggactgtcgtgacgacggcggtgctgctggaccaccgcatgggcgcttctcttctccggctccacttccacgactgctttgtgcaagggtgcgacgcgtccgttctgctggatgacacggccggcttcaccggcgagaagggggccgggccgaacgccgggtcgctgcgcggtctggaggtgatcgacaagatcaagatgctgctggagttcatgtgcccgcggaccgtctcctgcgccgacatcctcgccgtcgccgcccgcgactccgtcgtccgtctaggggggccatcatgggcggttcaacttggaaggagggacgccaccacagcaagcgcgtcacttgctagtagtgacctcccaggccccaactccaacctcaatgatctcctcaccgctttctccaaaaaaggactaagcaccacggacatggttgctctatcaggggcccataccatcggccgggcgcagtgccagaactaccggaaccggatctacaccgacaccgacattgacggggcattcgcagcgtccctgcgaggcggctgcccacaggccggcggcgacggcaacctcgcgccgctcgacgcgtcctctcccaacaccttcgataacggctacttctccggcctcctctcccgccaggggctgctccattccgaccaggcgctgtacgacggcggctccacggacgatctggtcaggacctacgcctccaataacgatcagtttggcagcgacttcgctgcggcgatggtgaaactgagcaatatcggcctgctgacggggtcgtccggggagatcagggtcaactgccgggcggtgaattaacgatggatggatgggggcatcatgaaacgaacaaggcgtgcgatttccggaactgcaggcaacgaaactgcatatttatgtacactgcctatttatttcctgtccttgtgtccccgtcttgttatattacatccataatccatgttaagatggtggcattggtttaaaaaaaaaaaaaaaaaaa

SEQ ID NO: 163 - protein, 654 aa, Lolium perenne
MESSAVVPGTTAPLLPYAYAPLPSSSDDARENRSSGGVRWRACAAVLAASALAVVVVVGLLAGGRVDRVPAGADVASATVPAVPMEFPRSRGKDLGVSEKSSGAYSADGGFPWSNAMLQWQRTGFHFQPEQHYMNDPNGPVYYGGWYHLFYQHNPKGDSWGNIAWAHAVSKDMVNWRHLPLAMVPDQWYDSNGVLTGSITVLPDGQVILLYTGNTDTLAQVQCLATPADPSDPLLREWIKHPANPILFPPPGIGLKDFRDPLTAWFDHSDHTWRTVIGSKDDDGHAGIILSYKTKDFVNYELMPGNMHRGPDGTGMYECIDLYPVGGNSSEMLGGDDSPDVLFVLKESSDDERHDYYALGRFDAVANVWTPIDRDLDLGIGLRYDWGKYYASKSFYDQKKNRRIVWAYIGETDSEQADITKGWANLMTIPRTVELDRKTRTNLIQWPVEEVDTLRRNSTDLGRITVNAGSVIRLPLHQGAQLDIEASFQLNSSDVDAINEADVGYNCSTSGAAVRGALGPFGLLVLANGRTEQTAVYFYVSKGVDGGLQTHFCHDESRSTRAKDVVNRMIGSIVPVLDGETFSVRVLVDHSIVQSFAMGGRITATSRAYPTEAIYAAAGVYLFNNATGATVTAERLVVHEMASADNHIFTNDDL

SEQ ID NO: 164 - protein, 620 aa, Festuca arundinacea
MESRAFPNAAYAPLLPPTADDATLGKQDRPGVGWRGFLTVLAASGVVVLLVAATMLAGSRMGQAGDTDEDGAGGFPWSNEMLQWQRAGFHYQPEGHFMSDPDGPVYYRGYYHLFFQYNRRGVAWDDYIEWGHVVSQDLVHWRPLPLALRPDHWYDKKGVLSGTITVLHNGTLVLLYTGVTEDPMAESQCIAVPTDPNDPLLRHWTKHPANPVLAHPQGVQGMDFRDPTSAWFDKSDATWRILIGSKDDDNGSHAGIAFIFKTKDFLSFERVPGIVHRVEGTGMWECIDFYPVGGGHNSSSEELYVIKASMDDERHDYYSLGRYDAAANTWTPLDAELDLGIGLRYDWGKLYAATSFYDPLKQRRIMLGYVGETDSARADVAKGWASLQSIPRTVTLDEKTRTNLLLWPVEEVEALRYNSTDLSGITVDNGSVFHLPLHQATQLDIEASFRLDASDVAAINEADVGYNCSSSGGAAARGAIGPFGLLVHAAGDLRGEQTAVYFYVSRALDGTLRTSFCNDETRSSRARDVTKRVVGSTVPVLHGEALSMRVLVDHSIVQSFAMGGRVTATSRVYPTEAIYARAGVYLFNNATGASVTAERLIVHEMASAVYDETLIMVEDS

SEQ ID NO: 165 - protein, 623 aa, Festuca arundinacea; identical to SEQ ID NO: 66

SEQ ID NO: 166 - protein, 619 aa, Festuca arundinacea
MESRDFPSAAYAPLLPSAADDVALAKQDRPGVGWRGFLTVLAACGVVVLLVAASLLAGSRMGQAGDTDEDGAGGFPWSNEMLQWQRAGFHYQPEGHFMSDPDGPVYYRGYYHLFFQYNRRGVAWDDYIEWGHVVSQDLVHWRPLPLAMRPDHWYDKKGVLSGTITVLHNGTLVLLYTGVTEDPMAESQCIAVPTDPNDPLLRHWTKHPANPVLAHPQGVQGMDFRDPTSAWWDKSDSTWRILIGSKDDDNGSHAGIAFIFKTKDFLSFERVPGIVHRVEGTGMWECIDFYPVGGGHNSSSEELYVIKASMDDERHDYYSLGRYDAAANTWTPLDAELDLGIGLRYDWGKLYASTSFYDPLKQRRIMLGYVGEVDSARADVAKGWASLQSIPRTVALDEKTRTNLLLWPVEEVEALRYNSTDLSGITVENGSIFHLPLHQATQLDIEASFRLDASDVAAINEADVGYNCSSSGGAAARGALGPFGLLVHAAGDLRGEQTAVYFYVSRALDGSLRTSFCNDETRSSRARDVTKRVVGSTVPVLDGEVLAMRVLVDHSIVQSFAMGGRVTATSRVYPTEAIYARAGVYLFNNATGASVTAERLIVHEMASAVYDETVMVKDS

SEQ ID NO: 167 - protein, 1075 aa, Lolium perenne
MAGNDWINSYLEAILDAGGTAGDISAASVAGGDDGPGAGGGTAGEKRDKSSLMLRERGRFNPARYFVEEVISGFDETDLYKTWVRTSAMRSPQERNTRLENMSWRIWNLARKKKQIEGEEASRLSKKRLEREKARRDAAADLSEDLSEGEKGENINGSSVHDESTRGRMPRIGSTDAIEVWANQHKDKKLYIVLISIHGLIRGENMELGRDSDTGGQVKYVVELARALGETPGVYRVDLLTRQISAPDVDWSYGEPTEMLSPRNSENLGDDMGESSGAYIVRIPFGPREKYIPKEQLWPHIQEFVDGALVHIMQMSKVLGEQVGRERRVWPVVIHGHYADAGDSAALLSGALNVPMVFTGHSLGRDKLEQLLKQGRQTRDEVNATYKIMRRIEAEELCLDASEIVITSTRQEIEKQWGLYNGFDVTMERKLRARTKRGVSCYGRYMPRMIAIPPGMEFSHIVPHDVDLDGDEANEVGSGSPDPPIWADIMRFFSNPRKPMILALARPDPKKNITTLVKAFGEHPGLRNLANLTLIMGNRDVIDEMSSTNGAVLTSVLKLIDKYDLYGQVAYPKHHKQSEVPDIYRLAARTKGVFINCAYIEPFGLTLIEAAAYGLPMVATQNGGPVDIHRVLDNGILVDPHNQNDIAEALYKLVSDKHLWAQCRQNGLDNIHRFSWPEHCKNYLSRVGTVKPRHPRWQRSDDATEVSESDSPGDSLRDVHDISLNLKLSLDSEKAGTKINTERNSTNARRNLEDAVLKFSNAVSEGTKDESDENAEATTGSNKWPSLRRRKHIVVIAVDSVQNADLVQIIKNLFEASRKEKSSGAVGFVLSTSRAISETLTFLTSGGIQTTEFDAFICSSGSDLCYPSSSSEDMLSPTELPFMIDLDYHSQIEYRWGGEGLRKTLIRWAAENNSQSGQEVVTEDEECSSTYCISFKVKNTEAVPPVKDLRKTMRIQALRCHVLYSHDGSKLNLIPLLASRSQALRYLYIRWGVELANMTVVVGESGDTDYEGLLGGVHKTIILKGSFNAAPNQLHAARSYSLEDVISFDKPGIASVEGYLPDSLKSALQQFGVLN

SEQ ID NO: 168 - protein, 938 aa, Lolium perenne
MAAGNEWINGYLEAILDAGSKLRPQGVQLPPLETAPALAAEESSAAYNPTRYFVEEVVRSFDEQALHKTWTKVVAMRNSQERSNRLENLCWRIWNVSRQKKQVEWDYTKEVARRKLEQELGSREAAEDLSELSEGEKDTTTAKPDAAAAQPSADDGEHQQPQPRTRLARINSEVRLVSDDEEEQTKKRNLYIVLISIHGLVRGENMELGRDSDTGGQVKYVVELARALAATAGVHRVDLLTRQISCPDVDWTYGEPVEMLERLSSADADDDDGEQAGGGAYIVRLPCGPRDQYIPKEELWPHIPEFVDRALSHVTEVARALGEQLQPPPSPADGAVAAPIWPYVIHGHYADAAEVAANLASALNVPMVMTGHSLGRNKLEQLLKLGRMPGPEIQGTYKIARRIEAEETGLDTAEMVVTSTKQEIEEQWGLYDGFDLMVERKLRVRQRRGVSSLGRYMPRMAVIPPGMDFSFVETQDTADGDGADLQMLIAPDKAKKALPPIWSDVLRFFTNPHKPMILALSRPDPKKNVTTLLKAYGESRQLRELANLTLILGNRDDIEDMAGGGGAVLTAVLKLIDRYDLYGQVAYPKHHKQTDVPHIYRLAAKTKGVFINPALVEPFGLTIIEAAAYGLPVVATKNGGPVDILKALHNGLLVDPHSAEAITGALLSLLAEKSRWVECRRNGLRNIHRFSWPHHCRLYLSHVSTYCDQPSPHQPLRVPLALGSSTSFGADDSLSDSLRGLSLQISVDASSDLNAADSAAAIMDALRRRPASEKPASSGARALGFAPGRRESLLVVAVDCYGDDGKPDVEQLKKAIDAAVSVGECAGAKQGYVLSTGMTIPEAAEAIKACGADVASFDALICSSGAELCYPWKELVADEEYSGHVAFRWPGDHVKSAVPRLGSMEEIALAIDRPASSVHCHAYAATDASKVSITEHYL

SEQ ID NO: 169 - protein, 808 aa, Lolium perenne
MAAKLTRLHSLRERLGATFSSHPNELIALFSKYVHQGKGMLQRHQLLTEFEALFEADKERYAPFEDILRAAQEAIVLPPWVALAIRPRPGVWDYIRVNVSELAVEELTVSEYLAFKEQLVDEHASSKFVLELDFEPFNASFPRPSMSKSIGNGVQFLNRHLSSKLFQDKESLYPLLNFLKAHNHKGTTMMLNDRIQSLRGLQSALRKAEEYLTSIPEDTPSSEFNHRFQELGLEKGWGDTAKRVQDTIHLLLDLLEAPDPASLEKFLGTIPMMFNVVILSPHGYFAQSNVLGYPDTGGQVVYILDQVRALENEMLLRIKQQGLDITPKILIVTRLLPDAVGTTCGQRLEKVIGTEHTDILRVPFRTEKGILRKWISRFDVWPYLETYTEDVANELMREMQTKPDLIIGNYSDGNLVATLLAHKLGVTQCTIAHALEKTKYPNSDIYLDKFDSQYHFSCQFTADLIAMNHTDFIITSTFQEIAGSKDSVGQYESHIAFTLPDLYRVVHGIDVFDPKFNIVSPGADMTVYFPYTETDKRLTAFHPEIEELLYSDVENSEHKFVLKDKNKPIIFSMARLDRVKNMTGLVEMFGKNAHLKDLANLVIVAGDHGKESKDREEQAEFKRMYSLIEEYKLEGHIRWISAQMNRVRNAELYRYICDTKGAFVQPAFYEAFGLTVVEAMTCGLPTIATCHGGPAEIIVNGVSGLHIDPYHSDKAADILVNFFEKSTADPTYWDKMSEGGLKRIYEKYTWKLYSERLMTLTGVYGFWKYVSNLERRETRRYLEMFYALKYRSLAAAVPLAVDGENTDN

SEQ ID NO: 170 - protein, 815 aa, Lolium perenne
MGEAAGDRVLSRLHSVRERIGDSLSAHPNELVAVFTRLVNLGKGMLQPHQIIAEYNTAIPEAEREKLKDGAFEDVLRAAQEAIVISPWVALAIRPRPGVWEYVRVNVSELAVEELSVPEYLQFKEQLVEGSNKDFVLELDFEPFNASFPRPSLSKSIGNGVQFLNRHLSSKLFHDKESMYPLLNFLRAHNYKGMPMMMNDRVRSLSALQGALRKAEEHLSGLPADTPYSDFHHRFQELGLEKGWGDCAKRAQETLHLLLDLLEAPDPSTLEKFLGTIPMVFNVVILSPHGYFAQANVLGYPDTGGQVVYILDQVRAMENEMLLRIKQQGLDITPRILIVTRLLPDATGTTCGQRLEKVLGTEHTHILRVPFRTENGIVRKWISRFEVWPYLETFTDDVAHEISGELQANPDLIIGNYSDGNLVACLLAHKMGVTHCTIAHALEKTKYPNSDLYWKKFEDHYHFSCQFTTDLIAMNHADFIITSTFQEIAGNKDTVGQYESHMAFTMPGMYRVVHGIDVFDPKFNIVSPGADMSIYFPYSESQRRLTSLHPEIEELLYSDVDNDEHKFVLKDRNKPIIFSMARLDRVKNLTGLVELYGRNPRLQELVNLVVVCGDHGNPSKDKEEQAEFKKMFDLIEQYNLNGHIRWISAQMNRVRNAELYRYICDTKGAFVQPAFYEAFGLTVIEAMTCGLPTFATAYGGPAEIIVNGVSGYHIDPYQGDKASALLVEFFEKCQGDHSHWTKISLGGLQRIEEKYTWKLYSERLMTLTGVYGFWKYVSNLERRETRRYLEMLYALKYRTMASTVPLAVEGEPSSK

SEQ ID NO: 171 - protein, 581 aa, Festuca arundinacea
MAQAWAFFLLALFSFSSYVSRIFLCSRNGEGSFLCARAPEVPSIASDRYRTAYHFQPHKNWMNDPNGPMYYNGIYHLFFQHNPNGPQWGDIVWGHSVSTDLVNWIILEPAIEPDTPGDIKGCWSGSATVISGSQPVIMYTGGDVENHQVQNIALPKNRSDPYLIEWTKACNNPVLQPVGPGMNPGEFRDPTTGWIGPDGLWRISIGAEVNGYSAALLYKSEDFLNWSRVDHPLYSSSASTMWECLDFFAVLPGSNGGLDLSAAIPKGAKHVLKVSVDQCDKYMIGVYDLEHDAFVPDTILDDRWLLPRIDYGNYYASKSFFDSKNRRRIIWGWTNESDSSSDDVAKGWAGIYAIPRTIWLDRDGKQLLQWPVEEIESLRRNEINYQGLDLEKGDLYEIKGVDTLQADVEIDFELTSIDDADSFDPSWLLDPEKHCREAGASVHGGIGPFGLVILATGDMEEHTVVHFRVYKSQKEYMILMCSDIRRSSLRQGLYAPAYGGFFEFDLEKERKISLRTLIDRSAVESFGGGGRVCIIARVYPVAIVDDGSAHMYAFNNGSTTVRVPQIRAWSMMTAQVNLKKG

SEQ ID NO: 172 - protein, 562 aa, Lolium perenne
MNGIEHPGNGRTAYHFQPAKHWQNDPNGPMYHNGLYHFFYQYNPHGPTWDTGKLSWGHSVSGDLVNWAALDNALDPTAPFDANGCWSGSATILPGGRPAILYTGIDADKVQVQNVAFAKDPSDPLLREWEKPSCNPVIPYPADVTGNNFRDPTEAWRGRDGLWRVGIVAEVKGVGSLLVYRSADFLRWQRNAAPLHASSRDVPVLECPDLFPVAAAAQGATEGLETSAPSGAGVRHVLKLTDFAKEDHYMVGFYDDVADTFVPAEPERGDDPDNWRRLDHGHLYASKSFYDARNKRRILWAWVDETDGGGVARGWAGIQAFPRAMWLDADGKRLVQWPVEEIETLRRKRVGLRWATDVEAGGRKEIAGIVSSQADVEVVFEIPNLEEAETLDPEWVLDPKGLCAAKGASVHGGVGPFGLLVLASGDLEEHTAVFFRVFKHDGKYKVLMCTDLTKSSTKAGAHKPSYGAFLDVDVEKDKFISLRTLIDHTVVESFGDGGRTCMTARVYPEHAAMGSTHLYVFNNGTGAVKVSKLEAWELATAAVNGGSLAPVVVKASDPKEAL

SEQ ID NO: 173 - protein, 580 aa, Festuca arundinacea
MAHAWAFFLLALFSFSSCVSKLFIYSRNGEGSFLCTRSPEVPSIASKRYRTAYHFQSPKNWINDPCGPMYYNGIYHEFYQYNPGGTIAANIVWGHSVSTDLVNWIQLEPAIVRDTPYDIHGCWTGSITILPGDQPVIIYTGRDSDNHQSQNIELPKNRSDPYLREWTKADNNPRILPVGPDLNLTQFRDPTTGWIGPDGLWRIAIGAELNGYGAALLYKSEDFLNWTRVDHPLYSDNAPSMWECPDFFAVLPGNNGGLDLSAAIPKGAKHVLKMSVDYSDKYMIGVYDLKRDAFVPDVVLDDRRLWLRIDYGTFYASKSFFDSKRGRRVIWGWSNETDSVSDDGAKGWAGIHAIPRSIWLDSDGKQLLQWPIDEIESLRRDEINHQGLELKNGDLFEIKGIDTLQADIEVDFELTSIDSADPFDPSWLLDVERHCREAGASVQGGIGPFGLVVLASDNMEEHIAVHFRVYKSQKSHMILMCSDLRRSSLRSGLYTPAYGGFFEFDLEKERKISLRTLIDRSAVESFGGGGRVCITARIYPVALVDGRVHMYAFNNGSTTVRVPQLGAWSMMTAQVNVNKG

SEQ ID NO: 174 - protein, 569 aa, Festuca arundinacea Lolium perenne
MAQGWPFFLLVLFSSCVSNHLVNGERVFLFPQSHKVSSIVSKRYRTAYHFQPPKNWINGPMYYNGIYHEFYQYNPNGSLWGNIIWGHSVSTDLINWIPVEPAIERDIPSDINGCWTGSATIISGDQPIIIYTGADKENRQLQNIVLPKNKSDPYLREWTKAGNNPVIQPVGPGLNASQFRDPTTGWIGPDGLWRIAVGAELNGYGAALLYKSQDFLNWTRVDHPLYSSNASSMWECPDFFAVLPGNSGGLDLSAEIPNGAKHVLKMSLDSCDKYMIGVYDLKSDTFMPDSVLDDRRLWSRIDHGNFYASKSFFDSKKGRRIIWGWTNETDSSSDDVAKGWAGIHAIPRTIWLDSYGKQLLQWPIEEIESLRRNEISHQGLELKKGDLFEIKGTDTSQADVEVDFELTSIDNADPFDPSWLLDVEKQCREAGASVQGGIGPFGLVVLASDNMEEHTAVHFRVYKSQQSYMILMCSDLRRSSLRSGMYTPAYGGFFEFDLQKERKISLRTLIDRSAVESFGGGGRVCIMARVYPVVLVDDGGAHMYAFNNGSTTVRVPQLRAWSMSRAEHK

SEQ ID NO: 175 - protein, 588 aa, Lolium perenne
MGVRLGRVAWACPAVLVLLLQLAGASHVVYETSLLETEAAAATVPASIFELSTGYHFRPQKNWINDPNAPLYYKGWYHLFFQYNPKGAVWGNIVWAHSVSRDLINWVALETALAPSIDADKYGCWSGSATIMPDGTPVIMYTGVSRPDVNYEVQNVAFPKNSSDPLLREWVKPAHNPVIVPEGGINATQFRDPTTAWYADGHWRILVGALSGASRGVAYVYRSRDFRRWTRVRKPLHSAPTGMWECPDFYPVTVDGKESGVDTSVVSSSRVKHVLKNSLDLRRYDYYTVGTYDRLKERYVPDNPAGDKHHLRYDYGNFYASKTFYDPSKRRRILWGWANESDTAVDDVAKGWAGIQAIPRKVWLDPSGRQLMQWPVEEVEALRGKKPVSLKDRMVKRGEHVEVTGLQTAQADVEVSFEVPSLEGAEALDPALANDAQKLCGVKGADVEGGVGPFGLWVLASSKLEERTAVFFRVFKAAGNVNSTKPLVLMCSDPTKSSLNKNLYHPTFAGFVDIDMAKGKISLRSLIDQSVVESFGAGGRTCILSRVYPSLAIGRNAHLHVFNNGKADIKVSRLTAWEMKKPALMNGA

SEQ ID NO: 176 - protein, 670 aa, Lolium perenne
MPMEARDGVSMPYSYAALPEDAEAAVVGRGRRTGPLFAALLLTLVAALLAVAALAGVRLVGELPAGGVVMPNHPMEVMDVSGSRGPESGVSEKTSGAASESGGMLGADAGSNAFPWSNAMLQWQRTGFHFQPEKNWMNDPNGPVYYKGWYHLFYQYNPEGAIWGNKIAWGHAVSRDMLRWRHLPIAMFPDQWYDINGAWSGSATVLPDGRIVMLYTGSTNASVQVQCLAFPSDPSDPLLTNWTKYEGNPVLYPPPHVGEKDFRDPTTAWYDGSDGMWRIVIGSKDNRRAGMALTYKTKNFHDFELVPGVLHRVPATGMWECIDLYPVGGARGIDMTEAVAAASNSGGGEVLHVMKESSDDDRHDYYALGRYDAATNKWTPLDADADVGIGLRYDWGKFYASKTFYDPAKKRRVLWGWVGETDSERADVAKGWASLQSIPRTVVLDTKTGSNLIQWPVVEVETLRTNSTNLGSIIVEHGSVFPLSLHRATQLDIEASFRLDPLDVAAAKEADVGYNCSTSGGAAGRGALGPFGLLVLADARRHGGDTEQTAVYFYVARGLDGNLRTHFCHDESRSSRANDIVKRVVGNIVPVLDGEALSVRVLVDHSIVESFAQGGRSVVTSRVYPTEAIYANAGVYLFNNATGARVTATSLVVHEMDPSYNQNQAEMASL

SEQ ID NO: 177 - protein, 514 aa, Lolium perenne
MHADPNGPVYYRGWYHLFYQYNPEGAVWGNIAWGHAVSRDLVHWRHLPLAMVPDQWYDINGVWTGSATVFPDGTLNMLYTGSTNASVQAQCLAVPEDPNDSLLRNWTKHEANPVLLPPPGIGDKDFRDPTTAWFDESDQTWRTVIGSKDNNGHAGIAMVYKTKDFLNYELIPGYLHRVDGTGMWECIDFYPVGGKNGSEELYVIKESSDDDRHDWYTLGKYDAAANTFTAADPENDLGIGLRYDWGKFYASKTFYDPAKKRRVLWGWIGETDSERADVAKGWASLMSIPRTVELDEKTWTNLIQWPVEEIETLRIKSTDLGGITIDHGSVYPLPLHRATQLDIEASFRLDAATVAALNEADVGYNCSTSGGSTHRGALGPFGILVLADGKAEQTAVYFYVSKGLDGALETHFCHDESRSTLAKDVVKRVVGYTVPVLDGEAFSVRVLVDHSIVESFAMGGRSTATSRVYPTESIYGAAGAYLFNNATGGSVTVEKLVVHEMDSSYNQIFMADDL

SEQ ID NO: 178 - protein, 557 aa, Lolium perenne
MGSVPEESVVSVAAAETVFRSKLPDIEINNEQTLQSYCFEKMAEVASRPCIIDGQTGASYTYTEVDSLTRRAAAGLRRMGVGKGDVVMNLLRNCPEFAFSFLGAARLGAATTTANPFYTPHEIHRQAEAAGAKLIVTEACAVEKVLEFAAGRGLPVVTVDGRRDGCVDFAELIAGEELPEADEAGILPDDVVALPYSSGTTGLPKGVMLTHRSLVTSVAQLVDGSNPNVCFNKDDALLCLLPLFHIYSLHTVLLAGLRVGAAIVIMRKFDVGALVDLVRAHRITIAPFVPPIVVEIAKSDRVGADDLASIRMVLSGAAPMGKDLQDAFMAKIPNAVLGQGYGMTEAGPVLAMCLAFAKEPFKVKSGSCGTVVRNAELKVVDPDTGASLGRNQPGEICVRGKQIMIGYLNDPESTKNTIDKDGWLHTGDIGLVDDDDEIFIVDRLKEIIKYKGFQVAPAELEALLLTNPEVKDAAVVGVKDDLCGEVPVAFIKRIEGSEITENEIKQFVSKEVVFYKRINKVYFTDSIPKNPSGKILRKDLRARLAAGIPTEVAAPRS

SEQ ID NO: 179 - protein, 501 aa, Lolium perenne
MEVLLLEKALLGLFAAAVLAIAVAKLAGKRFRLPPGPSGAPIVGNWLQVGDDLNHRNLMGIAKRFGEVFLLRMGIRNLVVVSSPELAKEVLHTQGVEFGSRTRNVVFDIFTGNGQDMVFTVYGDHWRKMRRIMTVPFFTNKVVAQNRVGWEEEARLVVEDVKADPASATAGTVIRRRLQLMMYNDMFRIMFDRRFESVDDPLFNKLKAMNAERSILSQSFDYNYGDFIPILRPFLRKYLNRCTNLKTKRMKLFEDHFVADRKKALEQNGEIRCAMDHILEAERKGEINHDNVLYIVENINVAAIETTLWSIEWGIAELVNHPDVQSKLRDEMTAVLGADVAVTEPDLERLPYLQSVVKETLRLRMAIPLLVPHMNLSDAKLAGYDIPAESKILVNAWFLANDPKRWVRADEFRPERFLEEEKAVEAHGNDFRFVPFGVGRRSCPGIVLALPIIGITLGRLVQNFQLLPPPGQDKIDTTEKPGQFSNQILKHATVVCKPLEA

SEQ ID NO: 180 - protein, 361 aa, Lolium perenne
MGSVDASEKTITGWAARDATGHLSPYTYNLRRTGAEDVVLKVLYCGICHTDLHQTKNHLGASKYPMVPGHEVVGEVVEVGPEVSKYSVGDVVGVGVIVGCCRDCRPCKANVEQYCNKKIWSYNDVYTDGKPTQGGFASSMVVDQKFVVKIPAGLAPEQAAPLLCAGVTVYSPLKHFGLMTPGLRGGILGLGGVGHMGVKVAKSMGHHVTVISSSDKKRAEAMDDLGADAYLVSSDEAQMAAAMDSLDYIIDTVPVKHPLEPYLALLKMDGKLVLMGVIGEPLSFVSPMVMLGRKTITGSFIGSIEETEEVLRFCVDKGLTSQIEVVKMDYLNQALERLERNDVRYRFVVDVAGSNIDDTAA

SEQ ID NO: 181 - protein, 363 aa, Lolium perenne
MTVVEVLAAGDAAAAAVARPAGNGQTVCVTGAAGYIASWLVKLLLEKGYTVKGTVRNPDDPKNAHLRALDGAADRLVLCKADLLDYDAIRRAIDGCHGVFHTASPVTDDPEQMVEPAVRGTQYVIDAAAEAGTVRRMVLTSSIGAVTMDPNRGPDVVVDESCWSDLDFCKKTRNWYCYGKAVAEQAASELARQRGVDLVVVNPVLVIGPLLQPTVNASIGHILKYLDGSASKFANAVQAYVDVRDVADAHLRVFECAAASGRHLCAERVLHREDVVRILAKLFPEYPVPTRCSDEANPRKQPYKMSNQKLQDLGLEFRPVSQSLYETVKSLQEKGHLPVLSEQAEADKETLAAELQAGVTIRA

SEQ ID NO: 182 - protein, 360 aa, Festuca arundinacea
MGSTAADMAASADEEACMFALQLASSSILPMTLKNAIELGLLEILVAAGGKSLTPTEVAAKLPSAANPEAPDMVDRMLRLLASYNVVTCLVEEGKDGRLSRSYGAAPVCKFLTPNEDGVSMAALALMNQDKVLMESWYYLKDAVLDGGIPFNKAYGMSAFEYHGTDPRFNRVFNEGMKNHSIIITKKLLELYHGFQGLGTLVDVGGGVGATVAAIAAHYPAIKGVNFDLPHVISEAPQFPGVTHVGGDMFKEVPSGDAILMKWILHDWSDQHCATLLKNCYDALPAHGKVVLVECILPVNPEAKPSSQGVFHVDMIMLAHNPGGRERYEREFEALARGAGFTGVKSTYIYANAWAIEFTK

SEQ ID NO: 183 - protein, 543 aa, Lolium perenne
MVGFAKIAMEWIQDPLSWLFIASVVFVVLQRRRRGNVAPFPPGPKPLPIVGNMSMMDQLTHRGLAALAKEYGGLLHIRLGKLHTFAVSTPEYAREVLQVQDGAFSNRPATIAIAYLTYDRADMAFAHYGPFWRQMRKLCVMKLFSRRRPETWLAVRDESAALVRAVARRTGESVDLGELIFKLTKNVIFRAAFGAGAVAADAEEGDGAGKQDEFIAILQEFSKLFGAFNIGDFIPWLSWADPQGINVRLRAARNALDEFIDKIIDEHMERGKNPDDADADMVDDMLAFLPEAKPKKGAAGDGVDDLQNTLRLTRDNIKAIIMDVMFGGTETVASAIEWAMAEMMHSPDDLRRLQQELVDVVGLDRNVDESDLDKLPFLKCVIKETLRLHPPIPLLLHETAEDCVVGGYSVPRGSRVMINVYAIGRDRRAWKDADVFRPSRFVQGEGEAAGLDFKGGCFEFLPFGSGRRSCPGMALGLYALELAVAQLAHGFSWELPDGMKPSELDMSDVFGLTAPRATRLFAVPTPRLACTQLLGADDAGRQA

SEQ ID NO: 184 - protein, 713 aa, Festuca arundinacea
MECENGHVAANGDGLCVAQPARADPLNWGKAAEELSGSHLDAVKRMVEEYRRPVVTMEGASLTIAMVAAVAAGADTRVELDESARGRVKESSDWVMNSMANGTDSYGVTTGFGATSHRRTKEGGALQRELIRFLNAGAFGTGSDGHVLPAATTRAAMLVRVNTLLQGYSGIRFEILETIATLLNANVTPCLPLRGTITASGDLVPLSYIAGLVTGRPNSVATAPDGSKVNAAEAFKIAGIQHGFFELQPKEGLAMVNGTAVGSGLASIVLFEANILGILAEVLSAVFCEVMNGKPEYTDHLTHKLKHHPGQIEAAAIMEHILEGSSYMMLAKKLGELDPLMKPKQDRYALRTSPQWLGPQIEVIRAATKSIEREINSVNDNPLIDVSRGKAIHGGNFQGTPIGVSMDNTRLAIAAIGKLMFAQFSELVNDFYNNGLPSNLSGGRNPSLDYGFKGAEIAMASYCSELQFLGNPVTNHVQSAEQHNQDVNSLGLISSRKTAEAIDILKLMSSTFMVALCQAIDLRHIEENVKNAVKNCVKTVARKTLSTNDSGHLHNARFCEKDLLLTIDREAVFAYADDPCSANYPLMQKMRAVLVEHALANGEAEQDVQTSVFAKLATFEQELRAVLPKEVESARCSVENGTAAQQNRISECRSYPLYRFVRKELGTEYLTGEKTRSPGEEVDKVFVAMNQGKHIDALLECLKEWNGEPLPIC

SEQ ID NO: 185 - protein, 324 aa, Lolium perenne
MAPATPKDSSALPGLLLLFAAATSVAVANAQLSENYYGSSCPTALLTIRTVVTTAVLLDHRMGASLLRLHFHDCFVQGCDASVLLDDTAGFTGEKGAGPNAGSLRGLEVIDKIKMLLEFMCPRTVSCADILAVAARDSVVRLGGPSWAVQLGRRDATTASASLASSDLPGPNSNLNDLLTAFSKKGLSTTDMVALSGAHTIGRAQCQNYRNRIYTDTDIDGAFAASLRGGCPQAGGDGNLAPLDASSPNTFDNGYFSGLLSRQGLLHSDQALYDGGSTDDLVRTYASNNDQFGSDFAAAMVKLSNIGLLTGSSGEIRVNCRAVN

SEQ ID NO: 186 - protein, 398 aa, Lolium perenne
MAATMTVEEVRKAQRAEGPATVLAIGTATPANCVYQADYPDYYFKITKSDHLADLKEKFKRMCDKSQIRKRYMHLTEEILEENPNMCAYMAPSLDARQDIVVVEVPKLGKAAAQKAIKEWGQPRSKITHLVFCTTSGVDMPGADYQLTKMLGLRPSVKRLMMYQQGCFAGGTVLRLAKDLAENNRGARVLVVCSEITAVTFRGPHESHLDSLVGQALFGDGAAAVIIGADPDVSVERPLFQLVSASQTILPDSEGAIDGHLREVGLTFHLLKDVPGLISKNIERALEEAFKPLGIDDWNSVFWVAHPGGPAILDMVEAKVNLNKERMRATRHVLSEYGNMSSACVLFIMDEMRKRSAEDGHTTTGEGMDWGVLFGFGPGLTVETVVLHSMPIAADATA

SEQ ID NO: 187 - protein, 370 aa, Festuca arundinacea
MKQEVKSEMNGETMSGNKGPVVVTGASGFVGSWLVMKLLQAGYTVRATVRDPGNVEKTKPLLELPGAKERLSIWRADLSEEGSFDEAIAGCTGVFHVATPMDFESKDPENEVIKPTVEGMLSIMRACKEAGTVKRVVFTSSAGTVNIEERPRPAYDQDNWSDIDFCRRVKMTGQMYFVSKSLAEKAAMDYAKENGVDFISIIPTLVVGPFLSAGMPPSLVTALALITGNEAHYSILKQVQLVHLDDLCDSMTYLFEHPDANGRYICSSHDTTIHGIARMLKERFPEYDIPQKFPGVDDDLQPIHFFFKKLLDHGFRFRYTAEDMFDAAVWTCREKGLIPLGAEGAGGPASAAGKLGAVLVGEGQAIGAET

SEQ ID NO: 188 - protein, 329 aa, Lolium perenne
MATEAKGETVLVTGASGFIGSWLVRLLLARGYSVHAAVLNPDDKAETDHLLALAAAAGDEGRIRFFRCDLLDGAAMLAAVRGCSGVFHLASPCTVDLVLDPQKELVVPAVEGTLNVLRAAKEAGGVRRVVVTSSVSALVPCPGWPAGEVLDERCWTDIDYCDKNGVWYPASKALAEKAAWKFAEENGLDVVTVNPGTVLGEMIPPRLNASMAMFLRLLEGCKEEYADFFIGPVHVEDVALAHILLYENPSASGRHLCVEPICHWSVFAAKVAELYPDYKVPKFPEDTQPGLVRAEAVPKKLMALGLQFTPLEKIIRDAVESLKSRGCIA

SEQ ID NO: 189 - protein, 330 aa, Lolium perenne
MVSSTKGKVCVTGASGFVASWLIKKLLESGYHVIGTVRDPGNRRKVGHLWKLPGANERLQLVRADLLEEGSFDDAVRACEGVFHIASPVLGKSDSNCKEATLGPAINGTLNVLRSCKKSPFLKRVVLTSSSSAVRIRDETQQPELLWDETTWSSVPLCEKLQLWYALAKVFAEKAALDFAKENNIDLVTVLPSFVIGPSLSHELCTTASDILGLLQGDTDRFTLYGRMGYVHIDDVARSHILVYETPEATGRYLCSSVVLDNNELVGLLAKQFPVFPIPRRLKNPYGKQAYQLDTSKLQGLGLKFKGVQEMFNDCVESLKDQGHLLECPL

SEQ ID NO: 190 - protein, 326 aa, Lolium perenne
MAPATPKDSSSSALPGLLLLLAAATSVAVANAQLSENYYGSSCPTALLTIRTVVTTAVLLDHRMGASLLRLHFHDCFVQGCDASVLLDDTAGFTGEKGAGPNAGSLRGLEVIDKIKMLLEFMCPRTVSCADILAVAARDSVVRLGGPSWAVQLGRRDATTASASLASSDLPGPNSNLNDLLTAFSKKGLSTTDMVALSGAHTIGRAQCQNYRNRIYTDTDIDGAFAASLRGGCPQAGGDGNLAPLDASSPNTFDNGYFSGLLSRQGLLHSDQALYDGGSTDDLVRTYASNNDQFGSDFAAAMVKLSNIGLLTGSSGEIRVNCRAVN

SEQ ID NO: 191 - DNA, 26 bp, Artificial Sequence
  Made in the lab
catatggataagctcaatggttctgc

SEQ ID NO: 192 - DNA, 21 bp, Artificial Sequence
  Made in the lab
cggtagagatccagtctagag

SEQ ID NO: 193 - DNA, 28 bp, Artificial Sequence
  Made in the lab
tacatatgctgcacgagaagttctacag

SEQ ID NO: 194 - DNA, 21 bp, Artificial Sequence
  Made in the lab
ccacggctaactaatggttca

SEQ ID NO: 195 - DNA, 29 bp, Artificial Sequence
  Made in the lab
tacatatgaaaggttctgggctgtccgtc

SEQ ID NO: 196 - DNA, 22 bp, Artificial Sequence
  Made in the lab
ctagttcaccttggagcagttg

SEQ ID NO: 197 - DNA, 18 bp, Artificial Sequence
  Made in the lab
gcagacggcggtctactt

SEQ ID NO: 198 - DNA, 23 bp, Artificial Sequence
  Made in the lab
aaatgcaagtgacccaacgttac

SEQ ID NO: 199 - DNA, 20 bp, Artificial Sequence
  Made in the lab
tcatgacgattccaagaacg

SEQ ID NO: 200 - DNA, 19 bp, Artificial Sequence
  Made in the lab
gttgaccgtgactcgtcgt

SEQ ID NO: 201 - DNA, 27 bp, Artificial Sequence
  Made in the lab
actgaattctcggtcccagcctccatt

SEQ ID NO: 202 - DNA, 29 bp, Artificial Sequence
  Made in the lab
gtagcggccgcgcgaaaactcgtcggaga

SEQ ID NO: 203 - DNA, 27 bp, Artificial Sequence
  Made in the lab
gctgaattcctccgatggctctctgac

SEQ ID NO: 204 - DNA, 28 bp, Artificial Sequence
  Made in the lab
atgcggccgcaagtccaatcggccacac

SEQ ID NO: 205 - DNA, 25 bp, Artificial Sequence
  Made in the lab
tatgaattcggcgccgacgccggca

SEQ ID NO: 206 - DNA, 27 bp, Artificial Sequence
  Made in the lab
atgcggccgcgcaacatgctagcacaa

SEQ ID NO: 207 - DNA, 19 bp, Artificial Sequence
  Made in the lab
aaacagaagtagcggcggc

SEQ ID NO: 208 - DNA, 18 bp, Artificial Sequence
  Made in the lab
ggtcgtagaaggacttgg

SEQ ID NO: 209 - DNA, 18 bp, Artificial Sequence
  Made in the lab
cgccttcatcttcaagac

SEQ ID NO: 210 - DNA, 17 bp, Artificial Sequence
  Made in the lab
agccctggcgtaaatgg

SEQ ID NO: 211 - DNA, 20 bp, Artificial Sequence
  Made in the lab
gacgcaaggagagatccaga

SEQ ID NO: 212 - DNA, 20 bp, Artificial Sequence
  Made in the lab
agacgaggtgggtgatcttg

SEQ ID NO: 213 - DNA, 20 bp, Artificial Sequence
  Made in the lab
tccatcctcttcacccactc

SEQ ID NO: 214 - DNA, 20 bp, Artificial Sequence
  Made in the lab
ggcagcggtttctttattca

SEQ ID NO: 215 - DNA, 20 bp, Artificial Sequence
  Made in the lab
ggccatgtttcttcgcttac

SEQ ID NO: 216 - DNA, 20 bp, Artificial Sequence
  Made in the lab
ctacgacggaagggtgacat

SEQ ID NO: 217 - DNA, 20 bp, Artificial Sequence
  Made in the lab
gtggacatggaccagaaggt

SEQ ID NO: 218 - DNA, 20 bp, Artificial Sequence
  Made in the lab
cggtacatctcggtgaaggt

We claim:

1. An isolated polynucleotide comprising a sequence selected from the group consisting of:
(a) SEQ ID NO: 1-62 and 125-162;
(b) complements of SEQ ID NO: 1-62 and 125-162;
(c) reverse complements of SEQ ID NO: 1-62 and 125-162; and
(d) reverse sequences of SEQ ID NO: 1-62 and 125-162;

2. An isolated polynucleotide comprising a sequence selected from the group consisting of:
(a) sequences having a 99% probability of being functionally or evolutionarily related to a sequence of SEQ ID NO: 1-62 and 125-162;
(b) sequences having at least 75% identity to a sequence of SEQ ID NO: 1-62 and 125-162;
(c) sequences having at least 90% identity to a sequence of SEQ ID NO: 1-62 and 125-162; and
(d) sequences having at least 95% identity to a sequence of SEQ ID NO: 1-62 and 125-162,
wherein the polynucleotide encodes a polypeptide having substantially the same functional properties as a polypeptide encoded by SEQ ID NO: 1-62 and 125-162.

3. An isolated oligonucleotide probe or primer comprising at least 10 contiguous residues complementary to 10 contiguous residues of a nucleotide sequence recited in claim 1.

4. A kit comprising a plurality of oligonucleotide probes or primers of claim 3.

5. A genetic construct comprising an isolated polynucleotide of any one of claims 1 and 2.

6. A transgenic cell comprising a construct according to claim 5.

7. A construct comprising, in the 5′-3′ direction:
(a) a gene promoter sequence;
(b) a polynucleotide sequence comprising at least one of the following: (1) a polynucleotide coding for at least a functional portion of a polypeptide encoded by a polynucleotide of any one of claims 1 and 2; and (2) a polynucleotide comprising a non-coding region of a polynucleotide of any one of claims 1 and 2; and
(c) a gene termination sequence.

8. The construct of claim 7, wherein the polynucleotide is in a sense orientation.

9. The construct of claim 7, wherein the polynucleotide is in an anti-sense orientation.

10. A transgenic plant cell comprising a construct of claim 7.

11. A plant comprising a transgenic plant cell according to claim 10, or fruit or seeds or progeny thereof.

12. A method for modulating one or more of the lignin composition, fructan composition and tannin composition of a plant, comprising stably incorporating into the genome of the plant at least one polynucleotide of any one of claims 1 and 2.

13. The method of claim 12, wherein the plant is selected from the group consisting of grasses.

14. The method of claim 13, wherein the plant is selected from the group consisting of: Lolium perenne and Festuca arundinacea.

15. The method of claim 12 comprising stably incorporating into the genome of the plant a construct of claim 7.

16. A method for producing a plant having one or more of altered lignin composition, altered fructan composition and altered tannin composition, comprising:
(a) transforming a plant cell with a construct of claim 7 to provide a transgenic cell; and
(b) cultivating the transgenic cell under conditions conducive to regeneration and mature plant growth.

17. A method for modifying the activity of a polypeptide involved in a lignin, fructan or tannin biosynthetic pathway in a plant comprising stably incorporating into the genome of the plant a construct of claim 7.

18. An isolated polypeptide comprising an amino acid sequence selected from the group consisting of: SEQ ID NO: 63-124 and 163-190.

19. An isolated polypeptide comprising an amino acid sequence selected from the group consisting of:
(a) sequences having at least 75% identity to a sequence of SEQ ID NO: 63-124 and 163-190;
(b) sequences having at least 90% identity to a sequence of SEQ ID NO: 63-124 and 163-190; and
(c) sequences having at least 95% identity to a sequence of SEQ ID NO: 63-124 and 163-190
wherein the polypeptide has substantially the same functional properties as a polypeptide of SEQ ID NO: 63-124 and 163-190.

20. An isolated polynucleotide that encodes a polypeptide of claim 18.

21. An isolated polypeptide encoded by a polynucleotide of any one of claims 1 and 2.
